United States Patent Application Publication US 2019/0002960 A1 - sequence listing, part 11

SEQ ID NO: 11 - DNA, 2850503 bp, Staphylococcus aureus CA-347 (residues 1-1,425,252 of 2,850,503)
actactgctcaatttttttacttttatcgattaaagatagaaatacacgatgcgagcaatcaaatttcataacatcaccatgagtttggtccgaagcatgagtgtttacaatgtttgaataccttatacagttcttatacatactttataaattatttcccaagctgttttgatacacacactaaaagatattctatagaaggaaaagttatccacttatgcacatttatagttttcagaattgtggataattagaaattacacacagagttatactatttttagcaacatatacacaggtatttgacatatagagaactgaaaaagtataattgtgtggataagtcgtccaactcatgattttataaggatttatttattgatatttacataaaaatactgtgcataactaataagcaggataaagttatccactgattgttattaacttgtggataattattaacatggtgtgtttagaagttatccacggctgttatttttgtgtataacttaaaaatttaagaaagatggagtaaatttatgtcggaaaaagaaatttgggaaaaagtgcttgaaattgctcaagaaaaattatcagctgtaagttactcaactttcctaaaagatactgagctttacacgatcaaagatggtgaagctatcgtattatcgagtattccttttaatgcaaattggttaaatcaacaatatgctgaaattatccaagcaatcttatttgatgttgtaggctatgaagtaaaacctcactttattactactgaagaattagcaaattatagtaataatgaaactgctactccaaaagaagcaacaaaaccttctactgaaacaactgaggataatcatgtgcttggtagagagcaattcaatgcccataacacatttgacacttttgtaatcggacctggtaaccgctttccacatgcagcgagtttagctgtggccgaagcaccagccaaagcgtacaatccattatttatctatggaggtgttggtttaggaaaaacccatttaatgcatgccattggtcatcatgttttagataataatccagatgccaaagtgatttacacatcaagtgaaaaattcacaaatgaatttattaaatcaattcgtgataacgaaggtgaagctttcagagaaagatatcgtaatatcgatgtcttattaatcgatgatattcagttcatacaaaataaagtacaaacacaagaagaatttttctatacttttaatgaattgcatcagaataacaagcaaatagttatttcgagtgatcgaccgccaaaggaaattgcacaattagaagatcgattacgttcgcgctttgaatgggggctaattgttgatattacgccaccagattatgaaactcgaatggcaattttgcagaagaaaattgaagaagaaaaattagatattccaccagaagctttaaattatatagcaaatcaaattcaatctaatattcgtgaattagaaggtgcattaacacgtttacttgcatattcacaattattaggaaaaccaattacaactgaattaactgctgaagctttaaaagatatcattcaagcaccaaaatctaaaaaaattaccatccaagatattcaaaaaattgtaggccagtactataatgttagaattgaagatttcagtgcaaaaaaacgtacaaagtcaattgcatatccacgtcaaatagctatgtacttgtctagagagcttacagatttctcattacctaaaattggtgaagaatttggtgggcgtgatcatacgaccgtcattcatgctcatgaaaaaatatctaaagatttaaaagaagatcctatttttaaacaagaagtagagaatcttgaaaaagaaataagaaatgtataagtagtaaactttgggaaatgtaatctgttatataacagcactaataataactgtcattttttacatttctatatactaatgtggcaagatgagcaaaactcattttgtggataatgtttaaaagtcatacacaccatacacaagttatcaacatgtgtataacttcgccaaatctatgtttttaagacttatccaccaatccacagcacctactactattactaagaacttaaaacctatataattatatataaacgactggaaggagttttaattaatgatggaattcactattaaaagagattattttattacacaattaaatgacacattaaaagctatttcaccaagaacaacattacctatattaactggtatcaaaatcgatgcgaaagaacatgaagttatattaactggttcagactctgaaatttcaatagaaatcactattcctaaaactgtagatggcgaagatattgtcaatatttcagaaacaggctcagtagtacttcccggacgattctttgttgatattataaaaaaattacctggtaaagatgttaaattatctacaaatgaacaattccagacattaattacatcaggtcattctgaatttaatttaagtggcttagatccagatcaatatcctttattacctcaagtttctagagatgacgcaattcaattgtcggtaaaagtacttaaaaacgtgattgcacaaacgaattttgcagtgtccacctcagaaacacgcccagtactaactggtgtgaactggcttatacaagaaaatgaattaatatgcacagcgactgactcacaccgcctggctgtaagaaagttgcagttagaagatgtttctgaaaacaaaaatgtcatcattccaggtaaggctttagctgaattaaataaaattatgtctgacaatgaagaagacattgatatcttctttgcttcaaaccaagttttatttaaagttggaaatgtgaactttatttctcgattattagaaggacattatcctgatacaacacgtttattccctgaaaactatgaaattaaattaagtatagacaatggggagttttatcatgcaattgatcgtgcatctttattagcacgtgaaggtggtaataacgttattaaattaagtacaggtgatgacgttgttgaattgtcttctacatcaccagaaattggtactgtaaaagaagaagttgatgcaaacgatgttgaaggtggtagcctgaaaatttcattcaactctaaatatatgatggatgctttaaaagcaatcgataatgatgaggttgaagttgaattcttcggtacaatgaaaccatttattctaaaaccaaaaggtgacgactcggtaacgcaattaattttaccaatcagaacttactaaaaataaatataaataaaggatgacgtgattaattaaaacgtcatcctttatttttttggcaaaaataattctagatgtgtatgtaaaataaatttgacagcattttaaacagcaaataaaagacgccaattaaatttatgacaaatgtaaccaaaatttaataagtgtgcttatatgccctttaaatttaaaattttaatagtcaataacaagttgaatataaaagttaaacgccgttaaattgcgttaaaaaattgaaaatgacagtattgccaaaaaataagaattaattatttatatgtaaacggtttctacctctattttaaatgaaatttgtgacaaaaaaaggtataatatattaatgacatacaaagaaatggagtgattattttggttcaagaagttgtagtagaaggagacattaatttaggtcaatttctaaaaacagaagggattattgaatctggtggtcaagcaaaatggttcttgcaagacgttgaagtattaattaatggagtgcgtgaaacacgtcgcggtaaaaagttagaacatcaagatcgtatagatatcccagaattacctgaagatgctggttctttcttaatcattcatcaaggtgaacaatgaagttaaatacactccaattagaaaattatcgtaactatgatgaggttacgttgaaatgtcatcctgacgtgaatatcctcattggagaaaatgcacaaggaaagacaaatttacttgaatcaatttataccttagctttagcaaaaagtcatagaacgagtaatgataaggaactcatacgttttaatgctgattatgctaaaatagaaggtgagcttagttatagacacggcacgatgccattaacaatgtttataactaaaaaaggtaaacaagtcaaagtgaatcacttagagcaaagtcgtctaactcaatatattggacacctcaatgtggttctatttgcgccagaagatttgaatattgtaaaaggctctcctcaaataagacgacgctttatagatatggagttgggccaaatttctgctgtttacttaaatgatttagctcaataccaacgtattttaaagcaaaagaataattacttaaagcagttacaattaggccaaaaaaaggacttaacaatgttggaagtattaaatcagcagtttgctgaatatgcaatgaaagtaactgataaacgtgcacattttattcaagagctagagtcgttagcgaaaccgattcatgctggtatcacaaatgataaagaagcgttgtcgctgaattatttacctagtcttaaatttgattatgctcaaaatgaagcgacacgacttgaagaaattatgtctattcttagcgataatatgcaaagagaaaaagaacgaggcattagcttattcggaccacatcgagatgatataagttttgatgtgaatggcatggatgctcaaacatatggttctcaaggacagcaacgtacaacagctttgtccattaaattagctgaaattgagttaatgaatatcgaagttggggaatatcccatcttattattagacgatgtactcagtgaattagatgattcgcgtcaaacgcatttattaagtacgattcagcataaagtacaaacatttgtcactacgacatctgtagatggtattgatcatgaaatcatgaataacgctaaattgtatcgtattaatcaaggtgaaattataaagtaacagaaagcgatggtgactgcattgtcagatgtaaacaacacggataattatggtgctgggcaaatacaagtattagaaggtttagaagcagtacgtaaaagacctggtatgtatataggatcgacttcagagagaggtttgcaccatttagtgtgggaaattgtcgataatagtatcgatgaagcattagctggttatgcaaatcaaattgaagttgttattgaaaaagataactggataaaagtaacggataacggacgtggtatcccagttgatattcaagaaaaaatgggacgtccagctgtcgaagttattttaactgttttacatgctggtggtaaatttggcggtggcggatacaaagtatctggtggtttacatggtgttggttcatcagttgtaaacgcattgtcacaagacttagaagtatatgtacacagaaatgagactatatatcatcaagcatataaaaaaggtgtacctcaatttgacttaaaagaagttggcacaactgataagacaggtactgtcattcgttttaaagcagatggagaaatcttcacagagacaactgtatacaactatgaaacattacagcaacgtattagagagcttgctttcttaaacaaaggaattcaaatcacattaagagatgaacgtgatgaagaaaacgttagagaagactcctatcactatgagggcggtattaaatcttatgttgagttattgaacgaaaataaagaacctattcatgatgagccgatttatattcatcaatctaaagatgatattgaagtagaaattgcgattcaatataactcaggatatgccacaaatcttttaacttacgcaaataacattcatacgtacgaaggtggtacgcatgaagacggattcaaacgtgcattaacgcgtgtcttaaatagttatggtttaagtagcaagattatgaaagaagacaaagatagactttctggtgaagatacacgtgaaggtatgactgcaattatatctatcaaacatggtgatcctcaattcgaaggtcaaacgaagacaaaattaggtaattctgaagtgcgtcaagttgtagataaattattctcagagcactttgaacgatttttatatgaaaatccacaagtcgcacgtacagtggttgaaaaaggtattatggcggcacgtgcacgtgttgctgcgaaaaaagcgcgtgaagtaacacgtcgtaaatcagcgttagatgtagcaagtcttccaggtaaattagccgattgctctagtaaaagtcctgaagaatgtgagattttcttagtcgaaggggactctgccggggggtctacaaaatctggtcgtgactctagaacgcaggcgattttaccattacgaggtaagatattaaatgttgaaaaggcacgattagatagaattttgaataacaatgaaattcgtcaaatgatcacagcattcggtacaggaatcggtggcgactttgatctagcgaaagcaagatatcacaaaatcgtcattatgactgatgccgatgtggatggagcgcatattagaacattgttattaacattcttctatcgatttatgagaccgttaattgaagcaggctatgtgtatattgcacagccaccgttgtataaactgacacaaggtaaacaaaagtattatgtatacaatgatagggaacttgataaacttaaatctgaattgaatccaacaccaaaatggtctattgcacgatacaaaggtcttggagaaatgaatgcagatcaattatgggaaacaacaatgaaccctgagcaccgcgctcttttacaagtaaaacttgaagatgcgattgaagcggaccaaacatttgaaatgttaatgggtgacgttgtagaaaaccgtagacaatttatagaagataatgcagtttatgcaaacttagacttctaagcgctgtgaactgaacttttgaaggaggaactcttgatggctgaattacctcaatcaagaataaatgaacgaaatattaccagtgaaatgcgtgaatcatttttagattatgcgatgagtgttatcgttgcgcgtgcattgccagatgttcgtgacggtttaaaaccagtacatcgtcgtatactatatggattaaatgaacaaggtatgacaccggataaatcatataaaaaatcagcacgtatcgttggtgacgtaatgggtaaatatcaccctcatggtgacttatctatttatgaagcaatggtacgtatggctcaagatttcagttatcgttatccgcttgttgatggccaaggtaacttcggttcaatggatggagatggcgcagcagcaatgcgttatactgaagcgcgtatgactaaaatcacacttgaactgttacgtgatattaataaagatacaatagattttatcgataactatgatggtaatgaaagagagccgtcagtcttacctgctcgattccctaacttattagccaatggtgcgtcaggtattgctgtaggtatggcaaccaatattccaccacataacttaactgaattaatcaatggagtgcttagtttaagtaagaatcctgatatttcaattgctgagttgatggaggatattgaaggtcctgatttcccaactgctggacttattttaggtaaaagtggaattagacgtgcttatgaaacaggtcgtggttcaattcaaatgcgctctcgtgcggaaattgaagaacgtggcggtggtcgtcaacgtattgttgtcactgaaattcctttccaagtgaataaagcacgtatgattgaaaaaattgcagagctcgtacgcgacaagaaaattgacggtatcactgatttacgtgatgaaacaagtttacgtacaggtgtgcgtgtcgttattgatgtgcgtaaggatgcaaatgctagtgtcattttaaataacttatacaaacaaacacctcttcaaacatcatttggtgtgaatatgattgcacttgtaaatggtagaccgaagcttattaatttaaaagaagcgttggtacattatttagagcatcaaaagacagttgttagaagacgtacgcaatataacttacgtaaagctaaagatcgtgcccacattttagaaggattacgtatcgcacttgaccatatcgatgaaattatttcaacgattcgcgagtcagatacagataaagttgcaatggaaagcttgcaacaacgcttcaaactttctgaaaaacaagctcaagctattttagacatgcgtttaagacgtctaacaggtttagagagagacaaaattgaagctgaatataatgagttattaaattatattagtgaattagaagccattttagctgacgaagaagtgttattacaattagttagagacgaattgactgaaattagagatcgttttggtgatgatcgtcgtactgaaattcaattaggtggatttgaagatttagaagatgaagacctcattccagaagaacaaattgtaattacactaagccataataactacattaaacgtttgccggtatctacatatcgcgctcaaaaccgtggtggccgtggtgttcaaggtatgaatacattagaggaagacttcgttagtcaattagtaacgttaagtacacatgatcatgtattgttctttactaacaaaggtcgtgtttataaacttaaaggttatgaagtgcctgagttatcaaggcagtctaaaggtattcctgtagtgaatgctattgaacttgaaaatgatgaaatcattagtacaatgattgctgttaaagaccttgaaagtgaagataacttcttagtgtttgcgactaaacgtggtgtcgttaaacgttcagcattaagtaatttctcaagaattaatagaaatggtaagattgcgatttcgtttagagaagatgacgagctaattgcagttcgcttaacaagtggccaagaagatatcttaatcggtacagcgcaagcatcattaattcgattccctgaatcaacgttacgtcctttaggtcgtacagcaacaggtgtgaaaggtattacacttcgtgaaggtgacgaagttgtagggcttgatgtagctcatgcaaacagtattgatgaagtattagtagttactgaaaatggttatggtaaacgtacgccagttaatgactatcgtttatcaaatcgtggtggtaaaggtattaaaacagctacgattactgagcgtaatggtaatgttgtatgtatcactacagtaactggtgaagaagatttaatgattgttactaatgcaggtgtcattattcgactagatgttgcagatatttctcaaaatggtcgtgcagcacaaggtgttcgcttaattcgcttaggcgatgatcaatttgtttcaacggttgctaaagtaaaagaggatgcagaagacgaaacgaatgaagacgaacaatctactgtatctgaagatggtactgaacaacaacatgaagcggttgtaaatgatgaaacaccaggaaatgcaattcatacggaagtaattgaatcagaagaaactgacgaagatggacgtattgaagtaagacaagatttcatggaccgtgttgaagaagacatacaacaatcatcagatgatgatgaagaataataaaaaaataagacttccctatatgtaggggagtcttatttttatgctagaaagtaatgctatactatattcaatgattagtaatgactaactttctaattgtttcattgcgtaaggtatttcattgataagtcttgatggtggcaccacatacatatcttttgcaagattttcgccaataaaactatgtgtatatgtggcactcataaccgcttcttttaagttatcaaattgaccaacaaaacttgtaatcataccagcaagtgtatcgcccataccaccagtcgccattgctgggctaccgattgtcaatttaaagtcttcatctttaaagaaaatttcagtgccatgttttttaagtacaacagttgcgcctaaacgatcaactgcttcacgattacgctcatatgtctgttcctcaataggaataccacttaatcgctcccattctttgagatgcggagtaaaaatcacgcgacatgtaggtaattgcggtttcagtttactaaatattgtaatcgcatcgccgtctacgattaaattttgatgcggttgtatattttgtagtaggaatgtaatggcattatttcctttgaaatcaacaccaagacctggaccaattaatatactgtcagtcatttcaatcattttcgtcaacattttcgtatcattaatatcaataaccatcgcttctgggcaacgagaatgtaatgctgaatgatttgttggatgtgtagctacagtgattaaaccactaccgctaaatacacatgcacgagccgctaacataatggcgccacctaagttagcagatccaccaattaataaaattttgccataatcacctttatgtgaatcttctttacgcttaggaatgttaatagaatttaacgtttccatagtgatataacctcccatgtaaaagccttttccgaatttattcaattttaaaaatatatagcaacttttaacaaaatgtattataaatttctgaattcattattatttgtcgttaaatacaatagaaaatactatacctgtatatgcaattcgtcaatagataaattattaaatatgcttacaacaatcttaatatcctttaacgcactacaatagtgctctgataataggttataaatgtacataaaaccattgtttcaataaaaatgaaaacgtatacttcaagaaggatgggttacttaatataaacaagggggtaacatatatgactttatatttagatggtgaaacactaacaattgaggatattaaatcatttttacaacaacaatcaaagattgaaattattgatgatgcgttagaacgtgtcaaaaaaagtagagcggtagttgaacgtattattgaaaatgaagaaacagtttatggcattacaacaggattcggattatttagtgatgtgcgtatagacccaacacaatacaatgaattacaagtgaatctgatacgctcacatgcctgtggattaggtgagccattttcaaaagaagtagcactcgttatgatggtattaagattaaatacattattaaaagggcattcaggtgctaccttagaattagtgagacaattacaattttttataaatgaacgtattataccgataataccgcaacaagggtcactaggtgcatcaggagatttagcgccattatcacatttagcattagcattaattggtgaagggaaagtgttttataaagatgtagaaatggatagtgcagaagtattaaagcaattaaatagtcaacctttgaaccttcaggctaaagaaggtttagcattgattaatggtacgcaagctatgacagctcaaggtgtcattagttatatagaagcagaagatttaggttaccaatctgaatggattgctgcattaacgcatcagtctcttaatggcattatagatgcatatcgacatgatgtgcacgctgttcgtaattttcaagaacagatgaatgtggcagcgcgtatgcgtgattggttagaaggatcaatattaacgacgcgacaagcagaaatacgtgtacaagatgcatatacgttgcgttgtataccacaaatccatggcgcgagttttcaagtattcaattatgttaaacagcaattggaatttgaaatgaatgcggctaatgataatccacttatatttgaggaagcaaatgaaacgtttgttatttcaggtggtaacttccatggacaacctattgcttttgcattagatcatcttaaattaggtgtaagtgaattagcaaacgtatcggaacgtcgtctagagcgactagtaaatcctcaattaaatggtgatttaccagcatttcttagtccagagccaggattgcaaagtggcgcgatgattatgcaatatgctgctgcaagtctcgtttctgaaaataaaactttagcgcatccagcgagtgttgattctatcacttcatctgcgaaccaagaagatcacgtatctatgggaactacagctgctagacatggttatcaaattattgaaaatgcaagacgtgtgttggcaatcgaatgtgttattgcattacaagcagcagagttgaaaggtgtcgaaggattatcaccaaaaacacgtcgcaagtatgatgagtttcgaagtatcgtgccatccattacacatgaccgtcaatttcataaagatattgaagcggttgcacagtatttaaagcaatcaatttatcaaacgactgcatgtcactaaatcgacatgagtgatgtttgaaatcgttacttgaaaaagcaaatatagtttgctatattaaaaataacttaataagacattgttcgtaggacaagtaatatatagtgttcgatatcagagagcttgtggttagtgtgaacaagaatcaatatatatatgaatctacctacttatttaaaagaacaatcggtgataaccgttattttagtgaagtgcaatttaggtttagtgtatctttataacttaaattgttaaatagggtggcaacgcgtagaccacgtcccttgtagggatgtggtctttttttattttctaagaaataaagacgtacgtcattccataataaatgataattatttgggaaaggatgaaggttaatgttagacattagattattcagaaatgagcctgacacagttaagagcaaaattgaattacgtggagatgatccaaaagttgtagatgaaattttagaattggatgagcaacgacgtaaattaattagtgcaacagaagaaatgaaagcacgtcgtaataaagtaagcgaagaaatcgcattaaaaaaacgtaataaagaaaatgctgatgatgtgattgctgaaatgcgcacattaggtgacgatattaaagaaaaagatagtcaattaaatgaaattgataataaaatgacaggtatcctttgtcgtattccaaatttaataagtgatgatgtacctcaaggtgaatctgatgaagataacgttgaagttaaaaagtggggtacaccacgtgagttttcatttgaaccaaaagcacattgggatattgtagaagaattgaaaatggctgattttgatcgtgcagcaaaagtttcaggtgcgcgttttgtatatttaacaaatgaaggtgcgcaattagagcgtgctttaatgaactatatgattacaaaacatacaacacaacatggttatacagaaatgatggtaccacagcttgtgaacgcagatacaatgtatggtacaggtcaattacctaaatttgaagaagatttatttaaagtagaaaaagaaggattatatacaattccaactgctgaagtaccattaacgaatttctatcgtaatgaaattattcaaccaggtgtacttcctgaaaaattcactggtcaatctgcatgtttccgtagtgaagcaggatcagcaggtagagatacaagaggattaattcgtttacatcaattcgataaagtggaaatggtacgttttgaacaacctgaagattcatggaatgctttagaagaaatgacaacaaacgcagaagcaattctagaagagttaggtttaccataccgtcgtgttattttatgtacaggtgatattggatttagtgcaagcaaaacatatgatttagaagtttggttaccaagctacaatgattataaagaaattagttcatgttcaaactgtacggatttccaagcgcgtcgtgctaacatccgcttcaagcgtgacaaagcagctaaaccagaattagcacatacattaaatggcagtggtttagcagttggacgtacatttgctgctattgttgaaaattaccaaaatgaagatggaacagtaacaattccagaagcattagtaccatttatgagtggtaaaacacaaatttcaaaaccagttaaataaaggctttagctacaagttttagaaagtatatatctacgtatacttaaagcaagggcaagatactttaaataatattttaaaaagtggtgacgaagctgtcgccactttttttgtgctgtaaaagtataatagtgagccaatgcacataataacaataaattaagtttgttgttcaatgggatgaacgcatttcattatagaaacaatatgagataatgatgatgaactaaaacaatctaaaacgtaacaagtttgagcaaaactattatagtcaattaagtgataaaaaactgatttcgttgctgtagtatgagtaatatcgatggagtagggggggaggggatgatgagtataagtgtttgagacacgaatcaatatcccagactcatcattagatataaaaaattataaaattagtacttaaaaataaacaccaaatccgcataaaatatggaggtagtcttaaataaaaaattgaaagttctcgaaaataaaaagttaatatgaagctgattaaagacttcggtatgtctaacctcagacaaactgatgtctaatgttattgcttagggtatagaactgtattagactaggtatattattttttcgtaattataaaaatataaagtgacaaaggaggtaattgagatgacaacgcatttaagttttagacaaggcgtgcaagagtgtatcccaacattattgggttatgccggtgtcggtatttcatttggtattgtggcttcgtctcaaaactttagtattttagaaattatcttgctatgccttgtgatatatgctggtgctgcgcaatttattatgtgcgcgctgtttatagcaggtacaccgatatcagcgattgtactaactgtatttatcgtaaattcaagaatgttccttttaagtatgtcgcttgcaccaaacttcaagacatatgggttttggaaccgtgttggattaggttcattagtaactgacgaaacgtttggtgttgccattacaccttatttaaaaggagaagctatcaatgatcgctggatgcatggtcttaatattacagcatatttattttgggtaattccgtgtgtagctggggctttatttggcgaatatatctcaaatccacaagcattaggattagactttgctatcacggctatgtttatctttttggccattgcgcaatttgaatcaattactaaatcgcgattaagaatttacatagtactcattattgccgtcatagtaatgatgttatcgttaagtatgtttatgccttcatatctagcaatattaattgcagccacaatttcagcagcgttaggagtgatgatggaacgatgataactcatatgaatatcttaatacttattttattgtgtggtatcataacgctattaattcgaattataccttttatcatgatttcaaaagtgcaattgcctgatgttgtggttcgatggctatcatttatcccaatcacactatttacggcacttgtcattgacagcattattcaacagacgcctcatggtgaggggtatacattaaacatcccttacattatcgcgctcattccgacggttattttatctataatcacgcgtagtttaactattacaattattagtgggattattatcatggcaacattacgatttttcttttaaaaataactgaaaatcattgaacagatatttaaacttaggtaaactgttagtaatcagaaaattctgatatacaaatcgtctatgttaagattgggaatcgtatacacgaaagcgatttggctaacgcatgacaatgataacaacattttaaatgataaaagtaattcatcactgaatctcaactaacacataacaatttcatatttcttattgtgagaagttgagggacttggccctgtgatacttcagcaaccgactttatagcacggtgctaaaaccaacgagttactcgaatgataagtataaagacttcttacttttcaatagggtgagaagtttttttgtttaaggaggaaagaacaatgacaaattacacagtagatactttaaatctagggaaatttattacagaatctggggaagtcatagataacttgcgtttgagatatgagcatgtcggttatcatggacaaccattagttgtagtttgtcatgcattaactggcaatcatttaacatatggaacagatgattatccgggttggtggcgagaaattattgatgggggatatatacccattcacgattatcaatttttaacatttgatgttattggtagtcctttcggttcaagttcacctttaaacgaccctcattttcctaaaaaattaacattaagagatattgttagagcgaatgaacgaggtatacaagcgcttggttatgacaaaattaatattttaatagggggaagtcttggaggtatgcaagcgatggaactactttacaatcaacagtttgaagtagataaagccattattcttgctgcaacaagccgaacatcatcttatagtagagctttcaatgaaattgcgcgtcaggccattcatcttggtggtaaggaaggtctaagtattgcacgccaattaggttttttgacatatcgatcatcgaaaagttatgatgaacgtttcacaccggatgaagtagtcgcataccagcaacatcaaggtaataaatttaaagaacgattcgatttgaattgttatctgacactgctagatgtattggatagtcacaacattgaccgaggtcgcacagacgtaacgcatgtttttaaaaatttagaaacgaaagtcttaacaatgggctttatagatgatttgctatatccggatgatcaagttcgtgcattaggtgaacgttttaaatatcatcgtcatttctttgtacctgataacgttggtcatgatggattcctactaaactttagtacctgggcacctaacttatatcatttcttaaatttaaagcattttaagcgcaagtaataatgtatattttcaaagaatgaagccactaaatcacagttatcatattcaaaaacatctagagtacatgagagtggaaatgaattgtaaatcaaaatcaagcttgattgctatgtagtgggattaaataatcatgttgaaaatgaaagcacacaaaagcgattcaaatgagtatgttaattacttataaaacatgaaagttattattcaattaaatgaaatagaagcatacaatctataaattgttaaattccattaaagaggttaaaataatagctatagttaaaaatatgggagtggcttatgtgttttcaaaaatacaacctaaagcaacaataattgcaacgattacgttggtatttgtcgctttagctttatatctagtgcctggtttaggactaatatttgcattatttgcaaccataccaggtatcgttttatggaataaatcaatacaatctttcgggattagtgcacttattacagtaattataacaactgttttaggtaatactttcgttttaagtgccatcatattagtcttaattgcaagtttaattattggtcaattgctcaaagaaagaacgtctaaagaaagaatattatacgtaacaacagtagcgatgagcttaatttcattaatcgcttttatgttactacaaacattcggaagaattccaccatcagcgagcatagtaaaacctttcaagcaaacattacatgaagcgattacgatgagcggtgccgatgcgaatatgacccaaatattagaagaagggtttagacaagcgaccgttcaattaccaggtttcatcattatcattacatttttaatcgtcttaattaacttaatcgttacatttccgattttacgaaaatttaaaatcgctacacctgtatttaagccacttttcgcgtggcaaatgagcggtattttattatggatatacattattgttatcatatgtttattatttacaggtcaaccgagtgtgttccagagcattcttttaaacttccaacttgtgttatcattagtaatgtatattcaaggtttaagtgttattcatttctttggtaaagcgaaaggtttgccgaatgcagtaacgattttactattgattatcggtacaatactgacacctacgacacatattgtaggactacttggtgttatcgatttaagtttgaatttgaagcgaatcatgaaaaataattctaaaaagtgaatagaggtggaataatgaatcggcagtccactaagaaagctttactaataccatttgtcatcatgatcatcacagcaattgttttaatgggtgtatggtttatctttaatagtcttatagcattaattgcatctatcgttcttgtcgtgatgattattgttagcatcgttttattcagacaagctttaatgaaaatggatagttatgtagatggtttgagtgctcaaatttcaacaacaaataataaagcaatcaaacatttaccaattggtatcattgttttagatgaaaatgatcacatcgaatgggttaaccaatttatgacagatcatatggaagcaaacgtcatttctgaatctgtaaatgaagtatttccaaacattttaaagcaattagatagagtgaaatccgttgaaatagaatataatcagtatcatttccaagtacgttattctgagaatgatcactgcctctatttctttgatataactgaacaagtacaaacaaatgaactatatgaaaattctaaaccaatcattgcgacattatttttagataactacgatgagattacgcaaaatatgaatgatacgcagcgttcggaaatcaattcaatggtaacgcgtgttattagtcgatgggcaactgagtataatatattctttaaaaggtatagttccgatcaattcgtagcctatttaaatcaaaaaatattagctgacttagaagaatctaaatttgatatcttgagtcaattacgtgaaaaaagtgttggttatcgtgcccaattaacattaagtatcggtgttggtgaaggtactgaaaatttaatcgacttaggtgaattatcacaatcaggcctagacttagcattaggacgtggtggtgaccaagttgcaattaaaagtattaatggtaatgtgcgcttctatggcggtaagactgacccgatggagaaacgtactcgtgtaagagcgcgtgttatctcacatgcgttaaaagatatccttgcagagggtgacaaagtcattatcatgggacataaacgtcctgacttagatgcaattggtgcagcaatcggtgtgtctagatttgcaatgatgaataatttagaagcatacatcgtattaaatgagactgacattgatccaacattacgacgcgtgatgaacgaaatagataaaaagccagagttaagagagcgatttattacatcagatgatgcttgggatatgatgacatctaagacaaccgtagtgattgttgatacgcataaaccggaactggttttagatgaaaatgtcttaaataaagcaaaccgtaaagttgttatcgatcatcatagacgtggtgaaagcttcatctctaatccattgttggtatatatggaaccatatgcaagttcgacagctgaattggtaacagagttactggaatatcaaccaacagaacaacgtttaacacgtcttgaatcaacagtgatgtatgcaggtattattgtagatacaagaaactttacattacgaacaggatcaagaacattcgatgcagcgagttatttacgtgcacatggtgcagatacgattttaacgcaacatttcttaaaagatgatgtggatacttacattaatcgatctgaattaattcgaactgtaaaagtcgaagataatggcatagccattgcgcatggttcagacgataaaatttatcatccagtaacagttgcacaagcagcagatgaactgttaagtttagaaggtattgaagcatcatatgttgttgcgagacgtgaagataatttgattggtatatctgcgcgttcactcggttcagtaaatgttcagttaacaatggaagcacttggtggcggtggacatttaaccaatgctgcaacacaacttaaaggtgtgacagtcgaagaggcgatagcacaattacaacaagcaattacagaacaattaagtaggagtgaagatgcatgaaagtaatttttacacaagatgttaaaggtaaaggtaaaaaaggtgaagttaaagaagtaccagtaggttatgcaaataacttcttattgaaaaagaattatgctgtagaagcaacaccaggtaatcttaaacaattagagttacagaaaaaacgtgcaaaacaagaacgccaacaagaaattgaagatgctaaagcattaaaagaaactttatcaaacattgaagttgaagtttcagcaaaaactggtgaaggtggtaaattgtttggatcagtaagtacaaaacaaattgccgaagcactaaaagcacaacatgatattaaaattgataaacgtaaaatggatttaccaaatggaattcattccctaggatatacgaatgtacctgttaaattagataaagaagttgaaggtacaattcgcgtacacacagttgaacaataaagttggattgaaataagaggtgtaaccattcatggatagaatgtatgagcaaaatcaaatgccacataacaatgaagctgaacagtctgtcttaggttcaattattatagatccagaattgattaatactactcaggaagtgttgcttcctgagtcgttttataggggtgcccatcaacatattttccgtgcaatgatgcacttaaatgaagataataaagaaattgatgttgtaacattgatggatcaattatcgacggaaggtacgttgaatgaagcgggtggcccgcaatatcttgcagagttatctacaaatgtaccaacgacgcgaaatgttcagtattatactgatatcgtttctaaacatgcattaaaacgtagattgattcaaactgcagatagtattgccaatgatggatataatgatgaacttgaactagatgcgattttaagtgatgcagaacgtcgaattttagagctatcatcttctcgtgaaagcgatggctttaaagacattcgagacgtcttaggacaagtatatgaaacagctgaagagcttgatcaaaatagtggtcaaacaccaggtattcctacaggatatcgagatttagaccaaatgacagcagggttcaaccgaaatgatttaattatccttgcagcgcgtccatctgtaggtaagactgcgttcgcacttaatattgcacaaaaagttgcaacgcatgaagatatgtatacagttggtattttctcactagagatgggtgctgatcagttagccacacgtatgatttgtagttctggtaatgttgactcaaaccgcttaagaaccggtactatgactgaggaagattggagtcgttttactatagcggtaggtaaattatcacgtacgaagatttttattgatgatacaccgggtattcgaattaatgatctacgttctaaatgtcgtcgattaaagcaagaacatggcttagacatgattgtgattgactacttacagttgattcaaggtagtggttcacgtgcgtctgataacagacaacaggaagtttctgaaatctctcgtacattaaaagcattagcccgtgaattagaatgtccagttatcgcgttgagtcagttatctcgtggtgttgaacaacgacaagataaacgtccaatgatgagtgatattcgtgaatctggttcgattgagcaagatgccgatatcgttgcattcttataccgtgatgattactataaccgtggtggcgatgaagatgatgacgatgatggtggtttcgagccgcaaacgaatgatgaaaacggcgaaattgaaatcatcattgctaagcaacgtaatggtccaacaggcacagttaagttacactttatgaaacaatataataaatttacagatatcgattatgcacatgctgatatgatgtaaaaaagtttttccgtacaataatcattttagtgataaaattgtacggtttttattttgttctgaacgggttgatatatgttaagtttgtgtattgaaagtgatggattagtgctgacaacgcctctgttaaagggtttttaggacgtttaagacgatttgttaaaatgatttttcttttaaaaaggccgaaaatcaatgttcgatttttatttgcattatggtctcgatattggtagaatatcaaatggttaaatgagaaaaacttggaggtgctcacatgtcatcaatcgtagtagttgggacacaatggggagacgaaggaaaaggaaaaataacggatttcttggcagaacagtcagatgttatcgcgcgtttttcaggtggtaataatgcaggccataccattcaatttggcggagaaacatataaattacatttagtaccatctggtatcttttacaaagacaaattagcggtaatcggtaacggagtcgttgttgatccagttgcactattgaaagaattggacggattaaatgaacgtggcatacctacaagtaatttacgtatttctaatcgtgcgcaagtgattttaccttaccacttagcacaagatgaatatgaagaacgtttacgtggtgataacaaaattggtacaactaaaaaaggtatcggtccagcatatgtagacaaagttcaacgtatcggtattcgtatggcagatttacttgaaaaagaaacattcgaaagattattaaaatcaaacattgaatataaacaagcatatttcaaaggcatgtttaacgaaacatgcccatcatttgatgatatctttgaagaatattatgcagcaggtcaacgtctaaaagaatttgtaacagacacatcaaaaatcttagacgatgcatttgtagcagatgaaaaagtacttttcgaaggtgcgcaaggtgtaatgttagatatcgaccacggtacatatccattcgttacatcaagtaacccaattgcaggtaatgttactgtaggtacaggtgtaggtccaacatttgtttctaaagtaattggtgtatgtaaagcttatacatcacgtgttggtgatggtccattcccaactgaattattcgatgaagatggacatcatattagagaagttggtcgtgaatacggtacaacaacaggacgtccacgtcgtgtaggttggtttgactcagttgtattacgtcactctcgtcgtgtaagtggtattacagatttatctattaactctatcgatgtgttaactggtttagacacagtgaaaatctgtacagcttatgaattagacggtaaagaaattactgagtatccagcaaacttagatcaattaaaacgttgtaaaccaatctttgaagagttaccaggttggacagaagacgtaacaaatgtgcgcactttagaagaattacctgaaaatgcacgtaaatatttagagcgtatttctgaattatgtaatgtacaaatttctatcttctcagttggtccagatagagaacaaacaaacttattaaaagaattgtggtagaactttatacaagtaatacacaatgatataaacgaatgagccttctatctttattggtaggaggcttttgctatgtttgcttctgtatcgattcgattatttagataaaaattactaacgtaaaggtggtatttgctagtcataatttagaagattagatgatatttaacgaaaattaagatgaaatacttgaatgtaataagtctgatgtcgaaaatagctattaaaatagagtagacgtaagtgtaaatgaaagtatctaaaatagaaaaatttcaaaaatagcgtaattattataataaatagactgccaataaaatgcaatttttcacttataacattcttcaaaaaataatagcaaaattatgtaaaaaatatcttgtcatggcaagattggctgtgctataatctatcttgtgcttaagaacggctccttggtcaagcggttaagacaccgccctttcacggcggtaacacgggttcgagtcccgtaggagtcaccatgttttaggtctcgtagtgtagcggttaacacgcctgcctgtcacgcaggagatcgcgggttcgattcccgtcgagaccgtacaaatgcctatccaagaggataggcatttttttacgtttaaaattatatcaattgaagacaaatggacgaatgataaacaaaatgatttatctattcgtccattttatttataatgtataaacttctggtaattcagttgcaatgtattaaagacaaatgtagaaaacaaattctttaattagattaccatgtgccttgattaacatactttttcatagtgatagaccaaaagagcccacttaacataaatataatagtatttattttcctcacatccacaccaataggaatcccgattttttcgcacctttaataatataaaaatgatttcgtggtcatattatagggaaagactaattattatcacaatccgccgtgagaaactaataaaaaatattaatatataagtttatattggaaaatagaattaatagcttataaatggtaaattatataataggttactatacgttataagacggaaaatgcgcacaataacaaaaatagtaagcgacatcctgtgattttttacacaaacataaacgataaagaacaaaaaatgataaaataatattaatgatttaagaaaagaggtttatgcaaatggctagaaaagttgttgtggttgatgatgaaaaaccgattgctgatattttagaatttaacttaaaaaaagaaggatacgatgtgtactgtgcatacgatggtaatgatgcagtcgacttaatttatgaagaagaaccagacatcgtattattagatatcatgttacctggtcgtgatggtatggaagtatgtcgtgaagtgcgcaaaaaatacgaaatgccaattataatgcttactgctaaagattcagaaattgataaagtgcttggtttagaactaggtgcagatgactatgtaacgaaaccgtttagtacgcgtgaattaatcgcacgtgtgaaagcgaacttacgtcgtcattactcacaaccagcacaagacactggaaatgtaacgaatgaaatcacaattaaagatattgtgatttatccagacgcatattctattaaaaaacgtggcgaagatattgaattaacacatcgtgaatttgaattgttccattatttatcaaaacatatgggacaggtaatgacacgtgaacatttattacaaacagtatggggctatgattactttggcgatgtacgtacggtcgatgtaacgattcgtcgtttacgtgaaaagattgaagatgatccgtcacatcctgaatatattgtgacgcgtagaggcgttggatatttcctccaacaacatgagtagaggtcgaaacgaatgaagtggctaaaacaactacaatcccttcatactaaacttgtaattgtttatgtattactgattatcattggtatgcaaattatcggtctgtattttacaaataaccttgaaaaagagctgcttgataattttaagaagaatattacgcagtacgctaaacaattagaaattagtattgaaaaagtatatgacgaaaagggctccgtaaatgcacaaaaagatattcaaaatttattaagtgagtatgccaaccgtcaagaaattggagaaattcgttttatagataaagaccaaattattattgcgacgacgaagcagtctaaccgtagtctaatcaatcaaaaagcgaatgatagttctgtccaaaaagcactatcgctaggacaatcaaacgatcatttaattttaaaagattatggcggtggtaaggaccgtgtctgggtatataatatccccgttaaagtcgataaaaaggtaataggtaatatttatatcgaatcaaaaattaatgacgtttataaccaattaaataatataaatcaaatattcattgttggtacagctatttcattattaatcacagtcatcctaggattctttatagcgcgaatgattaccaaaccaatcaccgatatgcgtaaccagacggtcgaaatgtccagaggtaactacacgcaacgtgtgaagatttatggtaacgatgaaattggcgaattagctttagcatttaataacttgtctaaacgtgtacaagaagcgcaggctaatactgaaagtgagaaacgtagactggactcagttatcacccatatgagtgatggtattattgcaacagaccgtcgaggacgtattcgtatcgtcaatgatatggcacttaagatgcttggtatggcgaaagaagacatcatcggttattacatgttaagtgtattaagtcttgaagatgaatttaaacttgaagaaattcaagagaataatgatagtttcttattagatttaaatgaagaagaaggtctaatcgcacgtgttaactttagtacgattgtgcaggaaacaggatttgtaacgggttatattgctgtgttacatgacgtgactgaacaacaacaagttgaacgtgagcgtcgtgaatttgttgccaatgtatcacatgagttacgtacacctttaacttccatgaatagttacattgaagcacttgaagaaggtgcatggaaagatgaggaacttgcgccacaatttttatctgttacccgtgaagaaacagaacgaatgattcgacttgtcaatgacttgctacagttatctaaaatggataatgagtctgatcaaatcaataaagaaattatcgactttaacatgttcattaataaaattattaatcgacatgaaatgtctgcgaaagatacaacatttattcgagatattccgaaaaagacgattttcacagaatttgatcctgataaaatgacgcaagtatttgataatgtcattaccaatgcgatgaaatattctagaggcgataaacgtgtcgagttccacgtgaaacaaaatccactttataatagaatgacgattcgtattaaagataatggtatcggtattcctatcaataaagtcgataaaatattcgaccgattctatcgtgtagataaggcacgtacgcgtaaaatgggtggtactggattaggactagccatttcgaaagagattgtggaagcgcacaatggtcgtatttgggcaaacagtgtagaaggtcaaggcacatctatctttatcacacttccatgtgaagtcattgaagacggtgattgggatgaataataaggaacatattaaatctgtcattttagcgctactcgtcttgatgagtgtcgtattgacatatatggtatggaacttttcgcctgatattgcaaatgtcgacaatacagatagtaagaagagtgaaacgaaacctttaacgacacctatgacagccaaaatggatacaactattacgccatttcagattattcattcgaaaaatgatcatccagaaggtacgattgcgacggtatctaatgtgaataaactgacgaaacctttgaaaaataaagaagttaagtccgtggaacacgttcgtcgtgatcataacttgatgattccaggtttgagcagtgattttacattattcgattttacgtatgatttaccgttatcaacatatcttggccaagtactgaacatgaatgcgaaagtaccaaatcatttcaatttcaatcgtttagttattgatcatgatgctgatgataatatcgtgctttatgctataagcaaagatcgccacgattacgtaaaattaacaactacaacgaaaaatgatcattttttagatgcattagcaacagtgaaaaaagatatgcaaccatacacagatatcatcacaaacaaagatacaattgatcgtacgacgcatgtttttgcaccaagtaaagctgagaagttaaaaacatatcgcatggtatttaacacgattagtgttgagaaaatgaatgctatactatttgacgattcaaccatcgttcgtagttcaaagagtggtgttacaacctacaacaataatacaggtgtcgcaaactataacgataaaaatgaaaaataccattataaaaacttgtccgaagatgaagcaagttcaagcaaaatggaagaaacgattccaggaacctttgattttattaatggtcatggtggtttcttaaacgaagatttcagattgtttagtacgaataatcagtcaggcgagctaacatatcaacgtttccttaatggttatccaacgtttaataaagaaggcgctaatcaaattcaagtcacttggggtgaaaaaggcgtctttgattatcgtcgttcgttattgcgtaccgacgttgttttaaacagtgaagataataaaacgttgccgaaattagagtctgtacgttcaagcttagcgaacaatagtgatattaattttgaaaaagtaacgaatatcgctatcggttacgaaatgcaagataatccggatcataatcacattgaagtgcagattaacagtgaactcgtaccacgctggtatgtagaatatgatggcgaatggtatgtttataacgatgggaggcttgaataaatgaactggaaactgacgaagacgcttttcattttcgtgtttattcttgtcaacatcgtgttagtatcgatttatgttaataaagtcaatcgctcacacattaatgaagttgagagtaataatgaagttaattttcagcaagaagaaattaaagtaccggctagtattttaaataaatcagttaaaggcatacaattagaacaaattacggggcgttcaaaagactttagttctaaagctaagggcgattcggatttgaccacatcagatggtggaaaattattaaatgcaaacattagccaatcagtaaaggtcagtgacaataacttaaaagatttgaaagattatgttaacaaacgtgtgttcaaaggttcagaatatcaattaagtgaaattagttctggttctgtaaaatacgaacaaacgtatgataatttcccgattttgaataatagtaaagcgatgttgaactttaatatagaagataacaaagcgactagttataaacaatcaatgatggatgacattaagcctacagatggtgcagataagaagcatcaagtgattggtgtgagaaaagcaatcgaggcattatattataatcgttacttgaaaaaaggtgatgaagtcattaatgctagactcggttactactcagtcgtgaatgaaacgaatgttcaattgttacaaccaaactgggaaattaaagtgaagcatgacggtaaggacaaaacgaatacttactatgtcgaagcgacaaataataaccctaaaattattaatcattaatatgaatcgtaataagctagcattgcaagctcatcatatgtgagaagcggtgctagctttttgctggtatggtttattatggctgacgtttttgcgtcctaacatgcgcatttattcatgtattaagtagaaccgtattgtaaaattaacgtaactgctattttaaaaactttagtatttgtctaatcattgttataataattaggacattcattgcacgtgattatcaaaatttaattataagagaccggtcgatgaactaaagttacataataggaaaggtatacaaaacagctaatatactgatagtttctgtagggaaaatcgtatatttgcactgatgtatattgcagtcatatagagagaatgactgcttaaatagaaaggatgagccgcttgatacgcatgagtgtattagcaagtggtagtacaggtaacgccacttttgtagaaaatgaaaaaggtagtctattagttgatgttggtttgactggcaagaaaatggaagaattgtttagtcaaattgaccgtaatattcaagatttaaatggtattttagtaacccatgaacatattgatcatattaaaggattaggtgttttggcgcgtaaatatcaattgccaatttatgcgaatgaaaagacttggcaggcaattgaaaagaaagatagtcgcatccctatggatcagaaattcatttttaatccttatgaaacgaaatctattgcaggtttcgatgttgaatcgtttaacgtgtcacatgatgcgatagatccgcaattttatattttccataataactataagaagtttacgattttaacagatacgggttacgtgtctgatcgtatgaaaggtatgatacgtggcagcgatgcatttatttttgagagtaatcatgacgtcgatatgttgagaatgtgtcgttatccatggaagacgaaacaacgcattttaggcgatatgggtcatgtatctaatgaggatgcgggtcatgcgatgacagacgtgattacaggtaacacgaaacgtatttacttatcgcatttatcacaagataataatatgaaagatttggcgcgtatgagtgttggccaagtattgaacgaacacgatattgatacggaaaaagaagtattgctatgtgatacggataaagctattccaacaccaatatatacaatataaatgagagtcatccgataaagttccgcactgctgtgaaacgactttatcgggtgcttttttatgttgttggtgggaaatggctgttgttgagttgaatcggattgattgaaatgtgtaaaataattcgatattaaatgtaatttataaataatttacataaaatcaaacattttaatataaggattatgataatatattggtgtatgacagttaatggagggaacgaaatgaaagctttattacttaaaacaagtgtatggctcgttttgctttttagtgtgatgggattatggcatgtctcgaacgcggctgagcagcatacaccaatgaaagcacaagcagcaacaacagataagcaacaagtaacgccaacaaaggaagcggctcatcaatctggtgaagaagcggcaaccaacgtatcagcatcagtacagggaacagctgatgatacaaacaacaaagtaacatccaacgcaccatctaacaaaccatctacagcagtttcaacaacagtaaacgaaacgcgcgacgtagatgcacaacaagcctcaacacaaaaaccaactcaatcagcaacattcaaattatcaaatgctaaaacagcatcactttcaccacgaatgtttgctgctaatgcaccacaaacaacaacacataaaatattacatacaaatgatatccatggccgactagctgaagaaaaagggcgtgtcatcggtatggctaaattaaaaacagtaaaagaacaagaaaagcctgatttaatgttagacgcaggagacgcattccaaggtttaccactttcaaaccagtctaaaggtgaagaaatggctaaagcaatgaatgcagtaggttatgatgctatggcagtcggtaaccacgaatttgactttggatacgatcagttgaaaaagttagagggtatgttagacttcccgatgttaagtactaatgtttataaagatgggaagcgcgcgtttaagccttcaacgattgtaacgaaaaatggtattcgttatggaattattggcgtaacgacaccagaaacaaagacgaaaacaagacctgaaggcattaaaggtgttgaatttagagatccattacaaagtgtgacagcagaaatgatgcgtatttataaagacgtagatacatttgttgttatatcacatttagggattgatccttcaacacaagaaacatggcgtggtgattacttagtgaaacaattaagtcaaaatccacaattgaagaaacgtattacagtcattgatggtcattcacataccgtacttcaaaatggtcaaatttataacgatgatgcattagcacaaacaggtacagcacttgcgaatatcggtaagattacatttaattaccgcaatggagcggtatcgaatattaagccgtcattgattaatgttaaagacgttgaaaatgtgacaccgaacaaagcattagctgaacaaattaatcaagctgatcaaacatttagagcacaaacagcagaggttattattccaaataatgcgattgatttcaaaggagaaagagatgacgttagaacgcgtgaaacaaatttaggaaacgcgattgcagatgctatggaagcatatggcgttaagaatttctctaaaaagactgactttgccgtgacaaatggtggaggtattcgtgcctctatcgcaaaaggtaaggtgacacgctatgatttaatctcagtattaccatttggaaatacgattgcgcaaattgatgtaaaaggttcagacgtctggacagcttttgaacatagtttaggcgcaccaacaacacaaaaagatggtaagacagtattaacagcgaatggtggtttactacatatctctgattcaattcgtgtttactatgatatgaataaaccatctggcaaacgaattaacgctattcaaattttaaataaagagacaggtaagtttgaaaatattgatttaaaacgtgtatatcacgtaacgatgaatgacttcacagcatcaggtggcgacggatatagtatgttcggtggccctagagaagaaggtatttcattagatcaagtactagcaagttatttaaaaacagctaacttagctaagtatgatacgacagaaccacaacgtatgttattaggtaaaccagcagtaagtgaacaaccagctaaaggacaacaaggtagcaaaggtagtgagtctggtaaagatgcacaaccaattggtaaagacaaagtgatgaatccagcgaaacaaccagcgccaagtaaagttgtgttgttaccaacgcatagaggaactgttagtagtggtagagaaggctctgatcgcgcattggaaggaactgctatatcaagtatgagtgggaaacaattggctaacatgtcagcgcctaaaggtagcgcacatgagaaacagttaccaaaaactggaactgatcaaagttcaagcccagcagcgatgtttgtattagtagcaggtataggtttaattgcgactgtacgacgtagaaaagctagctaaaatatattgaaaacaatactactgtatttcttaaataagaggtacggtagtgtttttttatggaaaaaagctataaccattgataaatatgggatataaaaacggggataagtaataagacatcaaggtatttatccacagaaatggggatagttatccagaattgtgtacaatttaaagagaaatacccacaatgcccacagagttatccacaaatacacaggttatacactaaaaaacgggcataaatgtcagaaaaatatcaaaaactgcaaaaaatattggtataataagagggaacagtgtgaacaagttaataacttgtggataactggaaagttgataacaatttggaggaccaaacgacatgaaaatcaccattttagctgtagggaaactaaaagagaaatattggaagcaagccatagcagaatatgaaaaacgtttaggcccatacaccaagatagacatcatagaagttccagacgaaaaagcaccagaaaatatgagcgacaaagaaattgagcaagtaaaagaaaaagaaggccaacgaatactagccaaaatcaaaccacaatccacagtcattacattagaaatacaaggaaagatgctatcttccgaaggattggcccaagaattgaaccaacgcatgacccaagggcaaagcgactttgtattcgtcattggcggatcaaacggcctgcacaaggacgtcttacaacgcagtaactatgcactatcatttagcaaaatgacattcccacatcaaatgatgcgggttgtgttaattgaacaagtgtatagagcatttaagattatgcgtggagaagcatatcataaatgatgcggttttttcagccgcttcataaagggattttgaatgtatcagaacatatgaggtttatgtgaattgctgttatgtttttaagaagcttatcataagtaatgaggttcatgatttttgacatagttagcctccgcagtctttcatttcaagtaaataatagcgaaatattctttatactgaatacttatagtgaagcaaagttctagctttgagaaaattctttctgcaactaaatatagtaaattacggtaaaatataaataagtacatattgaagaaaatgagacataatatattttataataggagggaatttcaaatgatagacaactttatgcaggtccttaaattaattaaagagaaacgtaccaataatgtagttaaaaaatctgattgggataaaggtgatctatataaaactttagtccatgataagttacccaagcagttaaaagtgcatataaaagaagataaatattcagttgtagggaaggttgctactgggaactatagtaaagttccttggatttcaatatatgatgagaatataacaaaagaaacaaaggatggatattatttggtatatctttttcatccggaaggagaaggcatatacttatctttgaatcaaggatggtcaaagataagtgatatgtttccgcgggataaaaatgctgcaaaacaaagagcattaactttatcttccgaactcaataaatatattacatcaaatgaatttaatactggaagattttattacgcagaaaataaagattcatcttatgatttaaaaaatgattatccatcaggatattctcatggatcaataagattcaaatattatgatttgaatgaaggattcacagaagaagatatgctagaggatttaaagaaatttttagaactatttaatgaattagcttcaaaagttacaaaaacatcctatgatagcttggtcaatagcatagacgaaatacaggaagacagcgaaattgaagaaattagaacagcacaaaaagataagacactcaaggaagtggaagcacctaaaggaataattccaaaatataaaaaaggtgtatcaaagactactaaaaatgattcagaaattgaaaaatcaaataaagagaataaattaaccggtaaagttggagaaaaattagcgctaaattactttaatgagctaattgataataaaatagacgaagataagaaagaacagtttaggaatattttaaatgataatccaggctctcaacacggtcatggctatgatttagtagcttttgatccaacaaatacagataaagctgtagaaaaatttattgaaattaaaacatctacatcttctagtattgaggaaccattttttatgtcgctaaatgaaatgtttgctatgaaagaatataagcagaaatatttaatattaagaatatttaatgtttccggtaaagaaccacaattttattttatagatccatatgcaaattattctgaatttaaagatgtagatgatctcattgacaaagtatttaatgtagaagctattcagtataaagtttttggcgaaaaatgattacttgaacaagagctaaaataaaattgtgatctaataaaaatagaaactgtaatttaaataaaactttctaaataagctaactgataaaaaatcagtttgtccacagtctgaaacaagattcctatattctttaggaatcttgttttttctatttttatggtgataaagagcagataagataatgtgtaataatcacaaaaaagttaaatattttaaggcttgtttaattattaatgattttatatataaagagcagtataataaagttgttaatatattatgaataatattcaagtaattttattgttttttaatttgtcgatatttaagttgagttaaatttaaagggtgtaatttgttttacaatgatgaagataattagtctatcaaaataaaggggttgggactgttatgagtgataatttgtcattattcattgactatatcaatgataatataatctatggtagtgaaatcaaacgggagaaattagagaatttatttaatcaatttgctataaaaaatgttgaaaagaacattgtctatgatgaactgaaatctttagatattacaatcattgagtcacaggattcatataaaaataaattgaagagattattttcggttctgttgcaaagtaaaaaaatatagctaaccactaatttatcatgtcagtgttcgcttaacttgctagcatgatgctaatttcgtggcatggcgaaaatccgtagatctgaagagacctgcggttctttttatatagagcgtaaatacattcaataccttttaaagtattctttgctgtattgatactttgataccttgtctttcttactttaatatgacggtgatcttgctcaatgaggttattcagatatttcgatgtacaatgacagtcaggtttaagtttaaaagctttaattactttagccattgctaccttcgttgaaggtgcctgatctgtaattaccttttgaggtttaccaaattgtttaatgagacgtttgataaacgcatatgctgaatgattatctcgttgcttacgcaaccaaatatctaatgtatgtccctctgcatcaatggcacgatataaatagctccattttccttttattttgatgtacgtctcatcaatacgccatttgtaataagcttttttatgctttttcttccaaatttgatacaaaattggggcatattcttgaacccaacggtagaccgttgaatgatgaacgtttacaccacgttcccttaatatttcagatatatcacgataactcaatgtatatcttagatagtagccaacggctacagtgataacatccttgttaaattgtttatatctgaaatagttcatacagaagactcctttttgttaaaattatactataaattcaactttgcaacagaaccatctaatcttcaacaaactggcccgtttgttgaactactctttaataaaataatttttccgttcccaattccacattgcaataatagaaaatccatcttcatcggctttttcgtcatcatctgtatgaatcaaatcgccttcttctgtgtcatcaaggtttaattttttatgtatttcttttaacaaaccaccataggagattaaccttttacggtgtaaaccttcctccaaatcagacaaacgttacaaattcttttcttcatcatcggtcataaaatccgtatcctttacaggatattttgcagtttcgtcaattgccgattgtatatccgatttatatttatttttcggtcgaatcatttgaacttttacatttggatcatagtctaatttcattgcctttttccaaaattgaatccattgtttttgattcacgtagttttctgtattcttaaaataagttggttccacacataccaatacatgcatgtgctgattataagaattatctttattatttattgtcacttccgttgcacgcataaaaccaacaagatttttattaatttttttatattgcatcattcggcgaaatccttgagccatatctgacaaactcttatttaattcttcgccatcataaacatttttaactgttaatgtgagaaacaaccaacgaactgttggcttttgtttaataacttcagcaacaaccttttgtgactgaatgccatgtttcattgctctcctccagttgcacattggacaaagcctggatttacaaaaccacactcgatacaactttctttcgcctgtttcacgattttgtttatactctaatatttcagcacaatcttttactctttcagcctttttaaattcaagaatatgcagaagttcaaagtaatcaacattagcgattttcttttctctccatggtctcacttttccactttttgtcttgtccactaaaacccttgatttttcatctgaataaatgctactattaggacacataatattaaaagaaacccccatctatttagttatttgtttagtcacttataactttaacagatggggtttttctgtgcaaccaattttaagggttttcaatactttaaaacacatacataccaacacttcaacgcacctttcagcaactaaaataaaaatgacgttatttctatatgtatcaagataagaaagaacaagttcaaaaccatcaaaaaaagacaccttttcaggtgctttttttattttataaactcattccctgatctcgacttcgttctttttttacctctcggttatgagttagttcaaattcgttctttttaggttctaaatcgtgtttttcttggaattgtgctgttttatcctttaccttgtctacaaaccccttaaaaacgtttttaaaggcttttaagccgtctgtacgttccttaaggaattccttagtgctttcatagattaaactcacatcacgctttaaatcgcttattttagactttaaagacttgttttcttcaagcaactcattataatcatttacattttcattaaatcgctctacaagaccactatatttttctttaacttgcccatgttctttacttaattttttatattctctcgccatatcagtactcatgagatttctaacatgctgttttaacctatcgttatctctcgcagcagtcactaagtttttataatcacgctccgatataacaacatttttggttggtttcttttctgttttcattatttcttttcccaaaccaaacatggacttttcacccgttggcacttcaacacttttcatgtgtcgtttcgctggtacttctaaatctgatttaactttatcgctataagcagtccattcatcttttttaactgctaaatttttttctagaaaatcaatctctttttccaaagtttgttttttaaatttagctgtctcaatatgtttacggtcagagccacgttcaccacgcttcaactcaaaaccctgttttttcatatgctcggggaatttatcttgtagccataacagttcttgacgattaaacacattttttccttgcagttttccatcacgcataggcacaacacctaaatgcatgtgaggggtttgctcatcattatgaactgttgcataagcaatattttgcttgccatatcgttcggaaaataatttataactttcctcaaaaaatcgtttttgttctcctggatccagttgctcaaaaaaatctcggtcagatgttactagcaactcatttacaagaacagcatctttcctcgtttttcttgtacctgttttttgtgattcaataatttctttgacacgttcgttgtaatcaatatttttatcatttttcaaatcataattttcacgtgttcgctcatggtcaatatcatcattcgttctactttttcgctctctttgattatgaaattgcatgccttttagtccagctgatttcactttttgcattctacaaactgcataactcatatgtaaatcgctcctttttaggtggcacaaatgtgaggcattttcgctctttccggcaaccacttccaagtaaagtataacacattatactttatattcataaagtgtgtgctctgcgaggctgtcggcagtgccgaccaaaaccataaaacctttaagacctttcttttttttacgagaaaaaagaaacaaaaaaacctgccctctgccacctcagcaaaggggggttttgctctcgtgctcgtttaaaaatcagcaagggacaggtagtattttttgagaagatcactcaaaaaatctccacctttaaacccttgccaatttttattttgtccgttttgtctagcttaccgaaagccagactcagcaagaataaaatttttattgtctttcggttttctagtgtaacggacaaaaccactcaaaataaaaaagatacaagagaggtctctcgtatcttttattcagcaatcgcgcccgattgctgaacagattaataatagattttagctttttatttgttgaaaaaagctaatcaaattgttgtcgggatcaattactgcaaagtctcgttcatcccaccactgatcttttaatgatgtattggggtgcaaaatgcccaaaggcttaatatgttgatataattcatcaattccctctacttcaatgcggcaactagcagtaccagcaataaacgactccgcacctgtacaaaccggtgaatcattactacgagagcgccagccttcatcacttgcctcccatagatgaatccgaacctcattacacattagaactgcgaatccatcttcatggtgaaccaaagtgaaacctagtttatcgcaataaaaacctatactctttttaatatccccgactggcaatgccgggatagactgtaacattctcacgcataaaatcccctttcattttctaatgtaaatctattaccttattattaattcaattcgctcataattaatcctttttcttattacgcaaaatggcccgatttaagcacaccctttattccgttaatgcgccatgacagccatgataattactaatactaggagaagttaataaatacgtaaccaacatgattaacaattattagaggtcatcgttcaaaatggtatgcgttttgacacatccactatatatccgtgtcgttctgtccactcctgaatcccattccagaaattctctagcgattccagaagtttctcagagtcggaaagttgaccagacattacgaactggcacagatggtcataacctgaaggaagatctgattgcttaactgcttcagttaagaccgaagcgctcgtcgtataacagatgcgatgatgcagaccaatcaacatggcacctgtcattgctacctgtacagtcaaggatggtagaaatgttgtcggtccttgcacacgaatattacgccatttgcctgcatattcaaacagctcttctacgataagggcacaaatcgcatcgtggaacgtttgggcttctaccgatttagcagtttgatacactttctctaagtatccacctgaatcataaatcggcaaaatagagaaaaattgaccatgtgtaagcggccaatctgattccacctgagatgcataatctagtagaatctcttcgctatcaaaattcacttccaccttccactcaccggttgtccattcatggctgaactctgcttcctctgttgacatgacacacatcatctcaatatccgaatagggcccatcagtctgacgaccaagagagccataaacaccaatagccttaacatcatccccatatttatccaatattcgttccttaatttcatgaacaatcttcattctttcttctctagtcattattattggtccattcactattctcattcccttttcagataattttagatttgcttttctaaataagaatatttggagagcaccgttcttattcagctattaataactcgtcttcctaagcatccttcaatccttttaataacaattatagcatctaatcggttctgttgcaaagtaaaaaaatatagctaaccactaatttatcatgtcagtgttcgcttaacttgctagcatgatgctaatttcgtggcatggcgaaaatccgtagatctgaagagacctgcggttctttttatatagagcgtaaatacattcaataccttttaaagtattctttgctgtattgatactttgataccttgtctttcttactttaatatgacggtgatcttgctcaatgaggttattcagatatttcgatgtacaatgacagtcaggtttaagtttaaaagctttaattactttagccattgctaccttcgttgaaggtgcctgatctgtaattaccttttgaggtttaccaaattgtttaatgagacgtttgataaacgcatatgctgaatgattatctcgttgcttacgcaaccaaatatctaatgtatgtccctctgcatcaatggcacgatataaatagctccattttccttttattttgatgtacgtctcatcaatacgccatttgtaataagcttttttatgctttttcttccaaatttgatacaaaattggggcatattcttgaacccaacggtagaccgttgaatgatgaacgtttacaccacgttcccttaatatttcagatatatcacgataactcaatgtatatcttagatagtagccaacggctacagtgataacatccttgttaaattgtttatatctgaaatagttcatacagaagactcctttttgttaaaattatactataaattcaactttgcaacagaaccgaaaaactagacttgattacaaaatggagcttgggacataaatgattttttaaaaatgagatgagacgtagattaactccataatcaatacgaatctatcgacttctttatttatgatattcatctctttttaatggaaataaaagtgcgattaatgtgataatacagttacgttaattaaaaaaataaaaatgcaaggagaggtaatatgctaactgtatatggacatagaggattacctagtaaagctccggaaaatacaattgcatcatttaaagctgcttcagaagtagaaggtataaactggttggagttagatgttgcaattacaaaagatgaacaactgattatcattcatgatgattatttagaacggactacaaatatgtccggggaaataactgaattgaattatgatgaaattaaagatgcttctgcaggatcttggtttggtgaaaaattcaaagatgaacatttgccaactttcgatgatgtagtaaaaatagcaaatgaatataatatgaatttaaatgtagaattaaaaggtattactggaccgaatggactagcactttctaaaagtatggttaagcaagtggaagaacaattaacaaacttaaatcagaatcaagaagtgctcatttcaagctttaatgttgtgcttgttaaacttgcagaagaaatcatgccacaatataacagagcagttatattccatacaacttcgtttcgtgaagactggagaacacttttagattactgtaatgctaaaatagtaaacactgaagatgccaaacttactaaagcaaaagtaaaaatggtaaaagaagcgggttatgaattgaacgtatggactgtaaacaaaccagcacgtgcaaaccaacttgctaattggggagttgatggtatctttacagacaatgcagataaaatggtgcatttgtctcaatagaaagttagaggtgagtcttacgtttcagtgacggtagacttacctttaacatgttacatactaaaaaattaatttgaataagaaagagagacatatatgaaatacgatgattttatagtaggagaaacattcaaaacaaaaagccttcatattacagaagaagaaattatccaatttgcaacaacttttgatcctcaatatatgcatatagataaagaaaaagcagaacaaagtagatttaaaggtatcattgcatctggcatgcatacactttcaatatcatttaaattatgggtagaagaaggtaaatacggagaagaagttgtagcaggaacacaaatgaataacgttaaatttattaaacctgtatacccaggtaatacattgtacgttatcgctgaaattacaaataagaaatccataaaaaaagaaaatggactcgttacagtgtcactttcaacatacaatgaaaatgaagaaattgtatttaagggagaagtaacagcacttattaataattcataataaaacagtgaagcaaccatcgttacggattgcttcactgttttgttattcatctatatcgtattttttattaccgttctcatatagctcatcatacactttacctgagattttggcattgtagctagccattcctttatcttgtacatctttaacattaatagccatcatcatgtttggattatctttatcatatgatataaaccacccaatttgtctgccagtttctccttgtttcattttgagttctgcagtaccggatttgccaattaagtttgcataagatctataaatatcttctttatgtgttttatttacgacttgttgcataccatcagttaatagattgatattttctttggaaataatatttttcttccaaactttgtttttcgtgtcttttaataagtgaggtgcgttaatattgccattattttctaatgcgctatagattgaaaggatctgtactgggttaatcagtatttcaccttgtccgtaacctgaatcagctaataatatttcattatctaaatttttgtttgaaatttgagcattataaaatggataatcacttggtatatcttcaccaacacctagttttttcatgcctttttcaaatttcttactgcctaattcgagtgctactctagcaaagaaaatgttatctgatgattctattgcttgttttaagtcgatattaccatttaccacttcatatcttgtaacgttgtaaccaccccaagatttatctttttgccaacctttaccatcgattttataacttgttttatcgtctaatgttttgttatttaacccaatcattgctgttaatattttttgagttgaacctggtgaagttgtaatctggaacttgttgagcagaggttcttttttatcttcggttaatttattatattcttcgttactcatgccatacataaatggatagacgtcatatgaaggtgtgcttacaagtgctaataattcacctgtttgagggtggatagcagtacctgagccataatcatttttcatgttgttataaatactcttttgaactttagcatcaatagttagttgaatatctttgccatcttttttctttttctctattaatgtatgtgcgattgtattgctattatcgtcaacgattgtgacacgatagccatcttcatgttggagctttttatcgtaaagtttttcgagtccctttttaccaataactgcatcatctttatagcctttatattctttttgttttaattcttcagagttaatgggaccaacataacctaatagatgtgaagtcgcttttcctagaggatagttacgactttctgtttcattagttgtaagatgaaatttttttgcgaaatcacttaaatattcatccatttttttaacggttttaagtggaacgaaggtatcatcttgtacccaattttgatccatttgttgtttgatatagtcttcagaaatacttagttctttagcgattgctttataatcttttttagatacattctttggaacgatgcctatctcatatgctgttcctgtattggccaattccacattgtttcggtctaaaattttaccacgttctgattttaaattttcaatatgtatgctttggtctttctgcattcctggaataatgacgctatgatcccaatctaacttccacataccatcttctttaacaaaattaaattgaacgttgcgatcaatgttaccgtagtttgttttaattttatattgagcatctactcgttttttatttttagatactttttttattttacgatcctgaatgtttatatctttaacgcctaaactattatatatttttatcggacgttcagtcatttctacttcaccattatcgcttttagaaatataactgctatctttataaacttgtttgaaatttttatcttcaattgcatcaatagtattattaatttctttatcttttgaagcataaaaatatataccaaacccgacaactacaactattaaaataagtggaacaatttttatctttttcatcaatatcctccttatataagactacatttgtagtatattacaaatgtagtatttatgtcaaaataatgttataatttttgtgatatggaggtgtagaaggtgttatcatcttttttaatgttaagtataatcagttcattgctcacgatatgtgtaatttttttagtgagaatgctctatataaaatatactcaaaatattatgtcacataagatttggttattagtgctcgtctccacgttaattccattaataccattttacaaaatatcgaattttacattttcaaaagatatgatgaatcgaaatgtatctgacacgacttcttcggttagtcatatgttagatggtcaacaatcatctgttacgaaagacttagcaattaatgttaatcagtttgagacctcaaatataacgtatatgattcttttgatatgggtatttggtagtttgttgtgcttattttatatgattaaggcattccgacaaattgatgttattaaaagttcgtcattggaatcgtcatatcttaatgaacgacttaaagtatgtcaaagtaagatgcagttctacaaaaagcatataacaattagttatagttcaaacattgataatccgatggtatttggtttagtgaaatcccaaattgtactaccaactgtcgtagtcgaaaccatgaatgacaaagaaattgaatatattattctacatgaactatcacatgtgaaaagtcatgacttaatattcaaccagctttatgttgtttttaaaatgatattctggtttaatcctgcactatatataagtaaaacaatgatggacaatgactgtgaaaaagtatgtgatagaaacgttttaaaaattttgaatcgccatgaacatatacgttatggtgaatcgatattaaaatgctctattttaaaatctcagcacataaataatgtggcagcacaatatttactaggttttaattcaaatattaaagaacgtgttaagtatattgcactttatgattcaatgcctaaacctaatcgaaacaagcgtattgttgcgtatattgtatgtagtatatcgcttttaatacaagcaccgttactatctgcacatgttcaacaagacaaatatgaaacaaatgtatcatataaaaaattaaatcaactagctccgtatttcaaaggatttgatggaagttttgtgctttataatgaacgggagcaagcttattctatttataatgaaccagaaagtaaacaacgatattcacctaattctacttacaaaatttatttagcgttaatggcattcgaccaaaatttactctcattaaatcatactgaacaacaatgggataaacatcaatatccatttaaagaatggaaccaagatcaaaatttaaattcttcaatgaaatattcagtaaattggtattacgaaaatttaaacaaacatttaagacaagatgaggttaaatcttatttagatctaattgaatatggtaatgaagaaatatcagggaatgaaaattattggaatgaatcttcattaaaaatttctgcaatagaacaggttaatttgttgaaaaatatgaaacaacataacatgcattttgataataaggctattgaaaaagttgaaaatagtatgactttgaaacaaaaagatacttataaatatgtaggtaaaactggaacaggaatcgtgaatcacaaagaagcaaatggatggttcgtaggttatgttgaaacgaaagataatacgtattattttgctacacatttaaaaggcgaagacaatgcgaatggcgaaaaagcacaacaaatttctgagcgtattttaaaagaaatggagttaatataatggataataaaacgtatgaaatatcatctgcagaatgggaagttatgaatatcatttggatgaaaaaatatgcaagtgcgaataatataatagaagaaatacaaatgcaaaaggactggagtccaaaaaccattcgtacacttataacgagattgtataaaaagggatttatagatcgtaaaaaagacaataaaatttttcaatattactctcttgtagaagaaagtgatataaaatataaaacatctaaaaactttatcaataaagtatacaaaggcggtttcaattcacttgtcttaaactttgtagaaaaagaagatctatcacaagatgaaatagaagaattgagaaatatattgaataaaaaataaaattgttgtgtttacaacaatacatagaaaacagaggaaacaatcaagtcgttgaatatttcctctgttttttagttgaaaaaattaaccgaaagcctgaatgcaagtcttgattaaatcaataatgcttgtaataacaccagtgaaatccatatgcataccctctttctatttaagatacattaagtataatatcaaacaaataaaaaatgttaaaaattccctaattggctatttagattgcataaatgtcaaaaatttgaaaaacatacaacgactttgcataaaaaatcgtcatattggaaatacgtaatttattgaaataataaaaaaaataaaagaacgaagatgataacctaagtgaggttttaagttgttctaaggtttaatttaatttatgttaaaatagttggtataaaaatacatgataaactataaactaaattcaaaataacttatggggtaggcaattatggaaaataaaatataaatgataatgaaaaaagagtgctaagggaaatttataaccatcataatatttcgcgtactcaaatatctaaaaatcttgagattaataaggcaacgatttctagtattttgaataagttaaagtataaatctcttgttaatgaggttggtgagggtgatagcacgaagagtggtggtagaaaacctattcttctgaaggttaatcatctttatggttattttatttctttggatttaacttatagttctgttgaagtgatgtacaattattttgatggtaatgtcattaagcatgaatcttatgatttacctgatgaaaaggttagtagtatattaagcataataaaaaaacatattgatattcaggagaaacttgatacttataacggactattaggtgtgtctgtttctatacatggagttgtggataatgagcagcatgtgacatatttaccattccatgaaactgaaggaatttcaattgctaagaaaataaaagaaattactaatgttccagtcgtagttgaaaatgaagcgaatctttcagcgttatatgaacgtaattttaatcataatttatcctacaataatcttattgctttaagtatacataaaggtattggtgctgggcttattattaataatcaattgtatcgtggtgcaaatggggaagcgggtgaaattggaaaaacacttgtctcaaaagttagcgataatgtggagatctttcataagattgaagatattttttcacaagaagctttactgcataatttaagtaatcaactaaatgagaagatgacgcttagcaaattaattcaattttataatgaaaaaaatccagtcgtagttgaagaaatggaacaatttataaataaaattgctgttttaatacataatttaaacacccagtttaatccgaatgcaatttacattaactgtccattgttcaatgaaatgcctgaaatattagaagcaattaagaaccagttcaaacaatattcacgtaacgaaattcaaataaagttaacatctaatgtcaaatttgcaactttgctaggtggtacattagcaattatccaaaaagtactacagattaatgatatttacttagatataaaagcataaaaaactaattcaaatgaataatcaaagttcgtaattgtctttataaaaaaatccctcaatccgaattgaattttcggattgagggatttttatagttctattgcagaagaaaactattttaaaaatgctggtaaatgttgatagccacctctaacgttaacaatattcgtaaatcctttatattctaatattcctaccgctattgaacttctaacacctgattgacaatgtacataaattaggtcatttttatcgaaaggtatatcttcatttaaaagtttaccgtgaggaatatgaattgcttgttttaaatgacctttacgccattcatcatcattacgaacatctaatacattatgttcttcaccagtcatttcagaactatgaatagatgatgtgacgatatttgtttgtggcaaacggtaactttttacattttcaaaaccaattaattgtaaagcatgaatagcttgttgaacggtagatttatcgccaattaattcaatatcttagtcataatctaaataccaaccaatttgatttataaaagttttattaaaaggaatattgatagttccatgcatatgaccaccatggaatgcttctttacttcgaagatcaaaagcagtttgtgtattgcttgaactagggtaaacattatatggttggtacatttgcataccaaattgatttatttttttcatttgtgaaaaatggtgtggtggagctggctgattgagtgttaaagtttcgataaatgaagtttcatctttaacattaaaagcccagttgtttattttctcataacccaaagtagttgtaggtaatgaacctagcgctttaccacaaggactccctgcaccatgacctggccaaatttgaatatagtctggtaatgttgcagcaaattgtatggactgatacatttgttttgctccgatttttgtagaaccttcaacatttacagctttttctaatagatctggtctacctacatcaccaacaaagatgaagtcaccgctaaataatcccattggtatactggaacccccaccttcgtcagtaagtaaaaaactaatactctcagggggatggcctggagtgtgtaagacttctaatttaatctttcctaaatagataatatcttgatgcttaacgaaatgtgtttgtttaggcatatttttataattaaattcatctttaccttcatcagatacgtatatacttgcattcaatttatttgccacatctctaatacctgaagcaaaatcagcatgaatatgtgtttctgcagctttagtaattgtgaatccttctttatctgcaacttttaaatattttgttaaatctcgtatagggtcaataatcattgcttctcctgtacgttgacatccaattaaataagatgcttgtgaaaaattgtcttcataaaattgtttgaaaaacaaaaaaaactcctttttaaaatagattttattgattagataaataagttatgatttgcttgctcagtatgtccaatataagtacctacgccaccataatcgacttcatctcttaattcttcttttgaaattcccataacatccatactcatggtacaagcaattaactttatatcttgatcgattgcttgatcgataagtgagtataaagaatcaacatttttcttgttcattacataacgcatcataatattacctagtccaaacatattcatttttgataatggcatatgtattggatccttaggtaacataaggtcaaacattttggaaatacctttctttttaacgcgagttgattgcgctttttttaatgcgttgaggccccaaaaagtaaagaaaatagttacatctttacctgctgctttagcgccatttgcgatgatcattgctgctactgccttatctaactcaccgctaaataaaacaattgttgtacctgtagcagtgtcattgatttcaaattcttttggcttttctttttgaataattgcattaattacatttgcttcttcagtaagatttacaagggtattccctgtttgtttcgcccaacttttaatatcactattgaaaccaggatctgtaactgttacctcgatttgctcacccgttgaaatattgttaatttctttactgatattaacaataggtccagggcactgaagacctctaaaatcaaattgtttacgattctctttgatttcaatatctttttctattaaaggagcactattgaagttctttgcttcataatctttatatccaccctttaaattcacgacatcataaccttgtttggctaaataatcgcaagctttagtgcttcggttaccgcttttacaatgtatataatacgttttgttgctattcttattgaatgatttaatctcttctactgggtgtaaagttgaaccgttaatgtgtcctaattcatattcttcttttgttctaacatcaatcaattgacccatttttgccaatttttctaattcttctttgtttaatgaattaatgtgtacttctttgtattgttccatacttacctcctataaatacctatgagggtataataaaacggatagaatcatttgccaaatacctataggggtatttgacaattttgttttaatttattattattaacttaatcaatttatgtggaggaaatgaatatgacttatgataaaaaaatgattaatcgtataaatagaatacaaggtcaattaaatggtgtcgtaaaaatgatggaagaagaaaaagattgcaaagatataattacgcaacttagtgcatctaaaggttctatacaacgtttaatggggattataattagtgaaaatttaatagaatgcgttaaaacagcagaagaaaataatgaaagttctcaagaattaattaatgaagcagttaatttattagttaaaagtaaataatggatatagcaaatatgactattatgttgctaattggcgtactgggtggatttatatctggattaataggtattgggggcgcaattattatttacccagctattcttatattgccaccattaataggtatacctgcgtatagtgcatatattgcttcgggacttacctctagtcaagtatttttcagtacacttagtggatcattaaatgcaagaaaacaaccagctttctctcctaaacttgttatatatatgggagggggtatgttgattggaagcatgttaggggcaattttagctagtttgtttaatgctacttttgtaaatacggtatatgtaataatcgccatacttgctttaatattgatgtttattaaagttaaacctactacacaagagacgaaatctaaacctttgctatttattatagttggatttggaattggtgtaatttcgggaattgtgggtgcaggtggagcatttatcatcattcctgtattattagcattatttaaattaccaatgaatacggtagtgaacaatagcatagcaattgcttttatatcttcagtaggggcattttttataaaattaatgcaaggatatataccagtagaaagtgcaatttttttgataattgaatgatgatcattttctgaaaatattatgtggtcatataatataatgcccatcatttcactaatctcttttattctctgagttattttgatatctcctggagaaggtgttacatcttatcaagagtaaattacaaaagaatcatttaaatcaatactttcactttgaatacatgtatttgaagtggaaggtacttatttcaaaaatagtaaaacctgtatcttaaattacttaatagtaacataagatacaggctgattttttattcattgttatttatactaaagcacccgatagctctgaaaacaatcacaaattcaacttttcaaagccacagctttaagttattttgtccagacaacccccattgcccaacccattttatggaattggcatccaggcaacaacttttcatataaatcgtaataattttgttcagataggtacttatctgaagctaaatgctcaagccatgatttagatgtgttgtgattataaattctaatcgcattttttattccaaatttgaaacaatgcggtaaaaactcttggattgcccctaatttataaacataggtaggcggtgtctcgacttcagatacattatcaagaataactattcttccttcctcattcaacagttccttcatttgctgtattacgctggctatatcatccaaatgatgaaaggttgttcggcttacaataaaatcaaacttctcattaaaattaagttgttctgcattcatattcagatagaccgtatttgttagttgacgtttagatttggcaagatcgagcatttgattagaaatatcaatccctaccacttcatcataataacttgctaatttctccactaacaaacccgagccacatccgatatctaatgctctgcctttctttggagacatattagacacaaagaatgaataatcattcaaaagctcattcacgaaatcgtaatcttctgcaaccttatcaaactgtgattctattgtattcaaaaagatcccccattcctactttatcgacattctttcattacttaccactttagatgttttttcgttggggataaaacttccctttagacaattttatccaaagacaatacaacagtgcaactttattaaagtcactgtcctttatcgcagcctttactttttagtaaagacagtggcttctcttatcaagtttcaaaacatattattttgaagaaaacgtccatctgaagtgtcaagtgcaaaattacatataaaggtttattctaaaatgaaaagatgatacaatcatattcagttacataaggaggtttcaattatgtgcaccagtatcgcagtagtagaaattactttatctcattcataatgaaaaaaatggaaaggagataaaagtatgggtactttttctatatttgttattaataaagttcgttatcaaccaaatcaaaattaattggttataatgaacgcttaatgtcagttcattataaccagtaaggagaaggttataatgaaccagtaaggagaaggttataatgaaccagaaaaaccctaaagacacgcaaaattttattacttctaaaaagcatgtaaaagaaatattgaatcacacgaatatcagtaaacaagacaacgtaatagaaatcggatcaggaaaaggacattttaccaaagagctagtcaaaatgagtcgatcagttactgctatagaaattgatggaggcttatgtcaagtgactaaagaagcggtaaacccctctgagaatataaaagtgattcaaacggatattctaaaattttccttcccaaaacatataaactataagatatatggtaatattccttataacatcagtacggatattgtcaaaagaattacctttgaaagtcaggctaaatatagctatcttatcgttgagaagggatttgcgaaaagattgcaaaatctgcaacgagctttgggtttactattaatggtggagatggatataaaaatgctcaaaaaagtaccaccactatattttcatcctaagccaagtgtagactctgtattgattgttcttgaacgacatcaaccattgatttcaaagaaggactacaaaaagtatcgatcttttgtttataagtgggtaaaccgtgaatatcgtgttcttttcactaaaaaccaattccgacaggctttgaagcatgcaaatgtcactaatattaataaactatcgaaggaacaatttctttctattttcaatagttacaaattgtttcactaaattaaagtaataaagcgttctctaatttcacaagaggacgctttattcttcccaaaaattgttcaatatttatcaataaatcagtagttttaaaagtaagcacctgttattgcaataaaattagcctaattgagagaagtttctatagaatttttcatatacttaacgagtgctttcacctttgaatatagtccttcccacttatcatcacactctccccgatagccttttctagctatatccagtaaagttacatgctctttaggtaaaagaggtatagcccattctgcagcgacatctttcgaggtaatttcaccagtagtcactgtttgccacattcgagctagggttaaaattacattacgctcatcaccttttatcccctcaattagttctggcaaagaatccttaattgctcttcgaatatctgtcaaaggtacggagacaagtatacttgaagaatcaggaccaaatagagaaatactattctttcttgcttgtgctaaaacaatagccaaatcaggatcatagcttggttcctgaatttgtccattctcaaattcacccctgagccactcaccgtatataaattctctttttggaggatattgccaagggacaacttcactcctatttataaccgtaacttcaagtggtctaacagaatccgtatttccaatctttcctgatatagtcattagtctttctgttagtttttttcgagttaattgaggtaaactatgattcacgacgactagaacatctacatcgctgttaatgcgtaaaccaccatttactgctgaaccaaatagatatactccaactattgaacttccaaataaatcttttacgatttttaatgtttgaatcgcttgatttggtatttttccgttaatcaaattgctcatgatttcacctcgttgattatgttcatataaagtttatattgatactcaatttacttaccctagattggacatatacttaaattactgttcaataaagctgaccgttagcgtttaagtacatcctttcacaatttgtctacagattaataattattctttattatacagatctccatataatttttgaatttggttctgtaattttttattttctttttctaattccattactcttctttttaaggttttaataaggatttcctccgaacgagaacttttcttgggttttgagactacatttgctgttatttgacgctcacgaagggattcgattctttgcctaatatcgtgttccttataaagccatgatttagaaacattagcttcctttgctattgaattaaaattaataactttaccttcaatcgaaaatttagaaatcgctttgtctactttttcccttgtcttttttgatttctgcttcgccaaacgtacaatttctgttgtatttctaacttgtttatccattgataattaccccgtcaaacttccaatgatttgttctaaacgctctttaacacggctattagtctctacttgtctttgccattgtttatccttagctatggctaataactcttctgtacgctctaactgttcttcgtgctgtggtaagaattgcttactggtacagaagtgagtgcaatctaagcatgcattcgcatgtggacaaccacctgctactactggcaatctacaataaccatttggaagcacttgtgcatttatatttttcttgaaccattgaagctctacatcatcgacttcattatcttcatctagatcaagcacatctccattattggtaaccagtttttcctgaaatttagtaaattcattttttagagtttcatcaaagatatgagcgtatctgcttgtcatttctgggctttcatgccccaaaaatttctgcacaatatgctggggcatcccgttgttaatcattcttgttcctactgtatggcgaaaggcatgggcatggaatctataaatctcacctgatttatccactatattttgctcataagctaatttatttaactcacctctaaatgtttcttgttttaatggcgatccatcttttcttggaaagaggtattcactatctggaaattcctctgaaactttatcttcccgaactttaataagtaaagctacctctttagatattggaactatatgctcctttttcattttccattgataatactttaaaaagaaatctccatctttgtcctctaatagacagccttttttcaaggtgcacaattcacttatcctcattccacattcttgaacaatcatagtcatcgtagctatatattcgggtaatttatcaagatgactgttcaattgctctaggacgaattcatctataaagcgtggttttgctcttggtattttcggatagtcctcagaataaattaatattttggaaggaacatcatcccattctagcctaagaagggtactaaatagtccttccaatatagagatcctcccagttattgtactaggttttattcccatcatgtttagttcacttaaatatgcttcaatttccactctcgttaattggtgtactctctgaacttgtttaaatttcatgtccagaaaattaaagaactctttaagtctttgggcaatatcacttacataggaaaagctatccacgttcaatctcaacttacaatatctttttacaagttgtttaaaatatgtattccgaaaccctttaaagttaattgtatattcatattgtgttgggttaaccttatcatctggcaaaggtaagttacgtctatcccaaacgtctttatcccactcctctccatcaaaataaaagttctcataaaactccataaattgttttagattagtaacatagtaggaattagcttttacaggtgttttttcttgattagcagtaatcttataattagtagtggtaattctaacaccccgttttgtcaaataagttctatactccgtcattgctttttcaataggaacttcagtaattgaagtaatgctaggatactttaaatctaagaaatctaacattttattaattactgttccttttctaatccagacagtttttgcattccatattccattgtttaaatggtaaaaataaaaatatttcaattctgttcttaaccacagatttttaacacgttcaaaacgaacccaacgattccttaaagcaggattcttacttaattctatggcagaaggatgtggacattttcttatatcccaactattattagcccaaaacccctgcatttcttcattcattacagctatttttttgctaatctcactctgactaataattttccttttactagaagcattcatttcttatgctcctttctctcgaggtatttattaaactcatttttcatatcctgatctgaaagatgaacataggtatttaacgttgtctgaacatgtgcgtgacctaatctcttttgaacgaacgcaacatcccatccttccctaattagctgcgttgcgtgagtgtggcgaagcatatgtgatgtaaattctattccagtccttttaactattcttctaactagatcaagaacactttggtactttagtggtttcccaaaatagccttcttttaaggaaataaaaacataatcatgctccaattcctcactatactcatatatcaagtaatctgtataaagtgacataagttctttactcacatgtattgttctttccttccttaatttaatataagcttcattaacattaacatctctaggtgttaaatggatttgattgtcccaagtgacaatatcttcaagcctaagcgataacacttcaccgattcttaaaccaccctcatacataagcattaaaattaatttatctcttttcgtatgacaagcatcaataatttgcttaacttcctttgatctcaatgttcttatctgtttctttttaacccttaactttaagacattcttttggtatctacccttattaacatgatgtaaaaatcctttgaaatttcttccctttgcttgtttaaatacatcaattgatttaaattctcctaatctacttaaataatcaagaaaactcataactacatttaaaattgtattcactgtcgtttcttctcttatggctttttttgactgaagatcaattacatttgatgctgaaggatatctcaaccaacctacgaagtctgctaacaactcaaagttaatatcattaagaataacacctctctgttccatgaactcgtacagcaactttaaatgatagcagtatgccttaatggtattaggagacttaccagtattatctaagtatttaataaatttcattactggttctattagctggtattctttatctagtaataaatacaatggatacggcttattctccacttctatcctttgaaccttcacatgttcccacctctttaaatactttaactactacaaattataaaccttgttaatttttatttaaagtaaaatatccctttaatatctcctcttaaactactttaactactattatttattatactatggttaatacatctccacttggatgattatgaccgagcattatactatttgcgttactgagtatcgctgttttgaatatttctctagggtgaatcaccgtttggttaatagatccaatcgatagtgtttgaatatgtgtaggttcatttttactgttcatacatatgagaatgagatgctctcggtcactgtttccaatgaatgaacgcatgatttctgccgcatcctcagggtttgaaatacgattttttagataacttaatgtatctgtttttatcatttgtagtgaaacaatattgatttccttcatcgtttacctccatatataggttatgctttcaaagtccatttttgacgtgctttagggttgagtgggtgcatgatttcatttgtggctggattaatgagctttttgactttctttttatgaggcttcaacatttccattacttgttcgacacgttctacaacaactggccgcttcgcataagcaccataagctagaatcactgtgtcactttcgctaattgctttcatcaagtggatgtctgtgtgtttatcataaggttctttaatatgtttaaggttctctggtgttttaatattagagaatagatttacaagatatacagcaccgtatcgttctgaattcgctaattgattgaggataagaacagttgtgagatcgagtgataatacaccatctaaatgagggtacatcgttatcactgtacaagcgggtttcttttcatcccatgttttcttgagtaaatagcggtgtttttcatccttgctaaatatagcttctgtgtatatcgtatttttgattgtattcatatatataatcacttcctttagtattcttctggtaaaagcatcacataataaaaagcgtctacgccatcttcacgaatgacgtagactttcttaggtaatgcattttgattttttacatagtttgtatagtgatattccaatttgtatgcaggttgttcttgttcatgtgtgattgagagtatattctcatcttcttgcagtttaaaaatgtgtaggtaatctgtatgaggttgattatctctttcttttaccatattccaaagtaagatttgaaggtctagagataggtattcactaatacctcttgtgatgtatcgattgattttcatgttattttacctcgtcttgaatttctttcataatgataatcgcttggctaataatcgtaacagatatttgtgccactttgatccagttattcatggtgagtccctccttctcttagtaaatgacgttcatcgataatcgtatttttagtatctgtgagatataaaaagtccatgtcaaaatgattcagataaccaacgctgatgagttggttattagcgtacataagaaatggatagatacttaggtcatgtagttcattattgtagtaggtataagtttcaagtgtaagatgtgcaagtggggaatcattaataaaacgttccggtagaatattttctgctgcttcttctaacgcttcgcattcccatgtttcattgttagatagttggaatagacgagttatatattgtttgagttcttgagtggtcgttttcatatcattgcctcctagatagtgttatagtgatgtagtttatgtacatcattgggataatatatatttgatttgtcatttattacgcatcccggtgagaatgagagaaaattccatatgaaaaaccgcttcaaaccttggtatgacaaggaaatcccgaaattccgcctattttgacgaacaatcaactcattctttataactattgatgttagggtggggctctgctttcttatatattatttatttataaagaataacgggattttgggattgtgcttgcacaatccttctgcttcttcgaatctgcaaatcccaatcatttcccgataaaaaatcattgtgggatgttctttagcaatttcaatataagcatcgtgtagttatgaaaaaaattacgacaatgactgtttcattagataagtgttattgaaattgataaagagaattttaaaaatggttagataaaataaatgaaagaatataatgaaaattattgttataacaatgattctattagctaaatagtaagatatagtgtttggggcaaaaacaaagacgaagtgctgagatgcacttcgtcgagttgtttattattgaaaagttgttttatgatttcgttattaagtttgagtgtgacatagaattgttttttatgattaccatcttttttaatatcaatgcgatcaatcactgatagatacaatgctttgagtcgagatttttctatgtgcttaatatcatgaaagatgtgttgtaatagtttactaatttctttggcatcaaataaaggcttatcttcattttgttgatttttgagttggttgatttgattcgtaatgtcattgagttgcttttcatatttttgaatacttggtctgattactgatgttaagtccggattatcctcgatggttttaatcaagttatttagtttgatttgtacttcatcatattgttgttgcttataagcaacaacaatatgatgaagtgcagcgccatcaacttgattttcttgattgacgtgtgttactacgcgttgaatgactttatcacttttgactatttcaagtatttgcttcatcacataatcttcaatcacatcagctcttacactgtttgccgaacatactttggaacccttgttccgaaaattactacatgaatagtaacgaatacgtttcttagtcccgtctttaagtgtattcgtggtattgcttgctgccataggtgcgccacattggggacagtgaataatgcctgtaagcagattcgttcctttgccatggacttggggtttttgactgacttgttttttacgcatttgtactttatcccataaatcttgattaataatgggggaatgcttaccttcagctatcactggtttatcattaagccctttacgacgtttttcactccaatctttgtatttcgcaaattgaattttgccgatatagaatgggttagctaatatatatgtgatagaactaatactaaaaggtttaccctttttagtgacatagcctttgtgatttaatgcattggctattttacgatagccatggcctttggcataggactcgaatatatatttcacaatattagcttcatgttgattaatcatcagttcatgtttactattaggtattttgtcatagcccagcggcaaattgccttgataatagccttcttgggcacgtctcgtttgacccataaatacattctcgacaatgttattacgttcgaattctgagaaactcgcaagtatttgtaacatgagcttaccagatgaagtattgacttccatacgctctgataaactgaaaaattcgacattttgtttgtgtaaatcttcgacaattttgagaagatcagatgtattacgagctaatcggtttgttttgtagaccataacacagtcgatatagccttctttcgcatccttcaatatacgttggagctcaggtcgattcatagatttacctgaaataccacggtcagcgtatatatctttaacttcaaaatgatggaagtcacagtattctttgatttgattgatttgtccgtcgatactataaccttctgtgctttgcatttttgttgatacacgtacatagataccgacacgttttgttttaagttgttgcattatgtttcatcctttcttcgtttatgcaatcgatgattgcatggtttgattgacgatattgagtggttcatttttgaaatagattcctataagatttttatctttcgtaatgtgaatggtttcaatataggggtacaatatgtttaacgtgaaacgtttttgaataatattttgaatggtgtgttgtatttgatgtccattgatagatgtagtgcgttgcggttgttgacgtaatgattgcgtttgttctctgaacgtttctgcatcgatgatgccttgtgccaacttttctatcagttgttcttgagtcaatgtgtgatgtttttctatgtttctttgtcttttgatgcgtttgtcaatcgcacctttaatttttgtgtagatgcgttgattttgataaaagtctttgcacacttctaatactttatcttcaagtgtttgtgcattgatgcctttaaaatcacagacaaagcgagaagcattcatgtttttaggacagacgtagtaacgtaatgtatgattcttttttctaacggtcatattcgtaagtgttgtattacaacatgggcatttgattttttgttttagttggttatccgaagatgtctgtttgatttgtttttgcgatcgaagtctctgcgcttgctcatatatacttgtggaaacaatagaaggaaacatattgtcgaattggccatattgattgttgacacgaccacaataattaggattgatgataatgttacgaacttgatagggttgtcgattgatatacgtgttatcttcttctaataactgtgcaattttcttataaccatgacctttaatgtaataattgaatacagcctttaccgttggtgactcattttgattgatgatgaatgctccgttgtgatattcgtaaccaaagggcgcatgggttgtaatcaatcgaccttgctttgctttttcttgaagcccatttctgacttgttctccaatgttatctgattcaagttcggccaagctgataaaaatattaagcttgaatcggtcgaaagcttgatccatatcaaagtaaccatcgtgtacgcttaagatatgaacatggtatgtttgacataatttgatgagttttaatgcatttttcagattacgatgtaatctattaagacgataacaacataatatgtcacattgcccttgttgaattaattgcgtcatttgtcgatacccactacgattatctttgcgtcctgattgtttgtcgctataaaagttgatatgttgaatatgatgtttttcggctattgcttcgatagcctgtttctgtgctgcaagagattgttgtttcatcgtactttgacgtaaatagcctatgacttgtttcatatcggctcctcctttcacagtaataatatatatttatggatgaattgatatataagcccaacatcaataagatgttgggcgttcatattagtcattcatttgattgatttcttcaattaccaaatcggctaatatctcgataagttcatccatgtttttcactccgttatttgttctatcttcaatacgtcgattattcagtttgatgcttcacggttgtatgataaagacaatcagaaatcttcgtgaactcctgaagggcctatcccctcattagcggatttaaaaagttctttcgcagctttgttatcatttgccggtgtccaattttgaattaacgacttatctttagttaatcccaggatagatgcaaactctacatctaattttagatggtaaaatacaagtgattgttttttaccgctattatctttgacacttcttttagttgtttggcgtccacggtcagctaatatgaaacctttatctcttaaggcgttgacaacattattaacatcttgaaattgatgattgtttagcatctgtttaaaaacgtttgcaatcatttttacttcgatatggtcatcttttaatgagattaatccatagttctcaaacatatttttcaaagcaccttcatctgaaaacttacctctgttttgtgctacaaattgaatgatgacatcgatagctttatcagctaatgagcgttcagagattgtatgaccatgataatcaataaagtagtctcttattttagcgatatcaatatctgtagctaaaacacgacctaatatttttgcagatgttgtaatgactgcataacgcttaaacatacgattgcctgtgttgcttttatcatctttcaatttagcttcaaaccaatctacttccttgtaaaaccattgaataacttcatcttcacgatttataagatatttagctactaacggtaaaacatgaccatagtttagtgctacagcttttttaatattgtcagcattggtcgcatttgtagtgaattgttcattaatctcgatggttcttacacgtaatccatcgttttgagctgaatcattaaaaatactgtgttctgacgttgaaatgacagaagtaccccaattcttaggcgttttaacttctccatgaacgtttgaacgttgacgaccttgaccttcagtgatggagtacaataaccccgttgtatctctaaaagttgctgatgagagttcatcaaatacaataggtataccaaaattgttactcaagtaaccttcaagtgcattacgtgtggcattccaatttctaaagagagtttcattacctttggtagggttaccagcgactgatacagctaaagaagctgcagttgacttaccggttgaggattgacctgtaaaactaaaaatgattccggcaaattcggtttcatgtttgtgcttcaggaaactcgtcactaaggcagaaataccaaatacgactgctaattctaaaagaagagaacctttaacctcttttagatacatgttaaaccaattatcaaatgtacctttaggagttaagtcataagcattatcacaaatggcgtcagatggagatttattatcaaattctttagtagtatagatttcacttaacgatacaataggaccaaacggtgtttccagtatacctaccccttcatataagtaggaaatgggtaattgattgcgcatttgttgcaacgcataacctaaatcttttgtatatttttcattaatactaaatccatacttcattaaagatggcagtttttgtgttgttaaaatatcactagattcaacaatttctttttgatcctcgtctgtaataattactttttcagtgttagttttagggtcaataaacttattttcgataacgataggacctgcgatttcaacttcagtaggcattcctcctttttctttgggaggcttgtctttataccaacctttttttgatttgtatcgtggtgaaggattaaatgaagggttagtttgagtcattagcgaacacctcctttcgaagggttgctgttatagtgtggattaggacctgttttaagataaactaagtgaccgtgagtatccttaccgataataataaatggaacacgtggcgcatgttttacaaaatatgcgaaccaacgtccaacattttgttgtacagcttttgaacattgtacatttgcacgactgttcaagtcatgaaatgtaaattcttctccttcaggtaaattgaatgaaatacctaatattttcttttttaactgctcgaatttatctgattgattgaaatacatttaacttcctcctactaatgaactaagataggaaaattaaatatgcgcacaattaactttcttaagttcattttagccaagaagttatcatttgaaagcttgtaaaaatatgttagaaattccgtactaaattaagatggatttttgttgacaaaataaaaaacgctgatttaacagcgctttaaataaaaattaatctgaagttatataaaagtagtcagaaggagtggtgttattatcattataataatctagtgctttattgatttcttttattaatttatcatgatgttcttttgttattttctttggatatttgagttctttttcttctaagtcttttggagacactaggtcactatttaaaattaatgataacagcatatttttaggtgccgaagctctggtgtctcgatgagtaatatattttgctaaattactgtttatacttactttttcattttctaaaaagtttgtactatttttaacatgagcatcagcaattttggtacttatttcagtgtttaaatcgtctatttcatctaaataatattcaagaatctgaagtttatctttagaagtgatacctttttcagtgaaaatcttaataatgatagatttgattccaatttctatattactgtctactagaaaatagagataataattagtcagagcatgttcataatctctttgatcagtaatttcatgattgatgaaataatataagttctctttgatacgattagaagaatctatatctttgtcattgataccgtttttaaaaaagtgtagataaactgagttgtttgagagtatatcatataatacaaataaactttttggtttaaatacatatgattttcctgatttaaagtttgctatgtttattcctagagcgttgcagaatttattaaaattagttgtaaaattatttttttcttgaataaacatgtcgttgtcatttaattctgaactatgatttttaatcatattgatattttcttcaatcttgtcactacttaaattttccatgcaaagtatactatatcttactatatcacttatatttatggaaaaatctttaggagaacgatttaaagtatcctttttattatcttgatctacagccctacatgaatcatcaaaaacttctttgacatttattttatcaatgttcaaaattatgtctactaaagcattttgaaaatcatcgctatatatgtctttattattcatagtgtcactacctttatttttaataacactatatattatatcttataaacctaataccatgaagaataaaaagaatgattcaaattttatatttaatccatagttggctgctatggttagtgtactagtctagttttactagtatataaaacagtactcaatttttattttttcaaaattataaaaaagaacacctatcatcgataggcactgaacccctaaaacgggaacttaataaaaacaccatgttctaggctattaattctctgtattttacaggggataagtagcctagtttttgttgaatttgattattattatagtttttaatgtacttttcgacaatatctattacaatatgattagagctattaagctgattattgatgtaaagagtttcagactttagcgaggaatggaaactttctatcggggcgttatcggcaggtgttccctttcgggacatacttctgataatgcctttttcttcgcataattgataataagcataagatgtataaacgctgccttgatcactatgtaatatatacccctcaggtatatcgatttgatttaatgtatcattaactaaacgttggtcttgtttatcatctattttatacgccacaatttctccgttataaatatccattatcgaagataaatacaacatagaatgatcaaatggtaaataagtaatatcggttgttaatacttctatgggacaattcgctttaaattatctttgtaataaattgtctgttttataatacggtttacctatccttgtcgtctttttaggtctaactcggcagttcaaatgatgcttctgcatcattctctgtactctcttatgattaattggtgatgtataacattgattaatcagtgctgtaatcttacgataaccgtaggtataatggttagcttcacataattcaataactttttgtgttacagtatcatttttataggttttgtttttccatcggtaatatgttgatttaggtatatttaatacttctagtatcaatttgattgaatagtttccttttaattgatccactaaatctatgactactgttggtaccacttcctttccaatgccttgtacttttttaaaatatccaattctatatcttttctcttattttctaattttaattgttctacttctgacagctcttctaatcctttaccgtaggtatattgtttaccaacgtgttgtgaaaatctataactttccccatttcgataccatcgccaccaagtttccacttgtgttctatttttaatatttaattctttcataatttcttttgttgaaaatcctgctgctttcatttcaactgctttatactttgtttctactgaataagaaactcttttcatagaaaaaacacctccgtatgattcattttaatatgaattcaacgaaagtgtttttatataattcccactaattggggtcagtctactatatgatacggttttttaatttaaagtatcaataataattggatatagagggaaagaagctataatgatatttgcttactaagtggataaagatattagaaaaacgagaagcaggacagttattaaatcggtagatattaatcataagtatttaactgaatttttaccttttgtcgaatatataactaaagttgaaggtagtaaaatatttatctagtcgatattaaaacaatttatcgaaaacgatggttttccatatcctctttagtagcaattttctaacaatatataattaattatatacaaattaagaataattaagaagtatatattaattagagatagtttaaaaattagatttcaatcaattaattaaaacaggttagactattaatttatactaacctgttaaaagtaacaaaattaagaatatattaaaacttgtgtaatgagtaagcctccaccaaatattaaaacaaacgcgacaacaggccatacgaaacgtaaccagtgtgagtagcgcacgtttaacatttgaagtgttgccattacaagtccagtaggcgctaagaacaacattgcatactgaccgaattgatatgttgtaacaataacaaatcttggtatacctactgtatcagctaatggcgcaaagataggcatagataatactgctaatcctgatgatgatggtacgataaatcctaaacagaaaaagataaagagcagaacaatgataaataaaggcccactcatatgttgcacgatagatgatgaaaagtgcaagattgtgtcagaaatcattcctttattcaatactaagttgattccacgagctaaaccaatgattaaagatacacctactaaacttgaagcgccattaacgaatgcatctacagtgcctttttcgcctaaaccatattgtcctgttccagcaataaacatgatgacaatggtaaagattaagaatgcagatgccatgactgggaaccaccatccttgtgtcataacaccccaaaccataatagggaatggtaggacgaaaagcgtaagaataatctttttacgtaatgtaaactcagaagaaccgtcatcatggagcacagaccactgtttttcaaatgctgctttgtcttcataagaataagaggatttaggatcttttttaatttttttacaataccagaataaataactaataacaaatatggcaccgatgatacaagcgcctattctccaataaagaccatcagtaaaagttgttcctgctgcattagaagcaatgacgactgagaatgggttgattgttgagaatgtactacccacagagcttgctaagaaaattgcaccgaaagtaagactttagaatctatgggaaagataataaggtttaatagaaatacaagaagtgtaaatagtaagcatataatttatacattttaatataatataacaagaaaggtaaacacaaagataataaaaataaaaatttaataaagatagagaattattaaattgtttttgatataaaacaacttaataaaaaatttaattttaggggaggataattataatataaagaaacatagaatggaattgcaattgggaagtatacgattttaactgcgaatcatatgttcaacgacttacaaatgcgtaaatcgataacacattcaaaaatatataatctgaaaattgatttactaagagaggattattgtagttacaggtgttaagttgctccaatatggagttgtcgtcttgttttatattaaacaagttttattcaaatacatgacaatacgtaaaataacactagaattatcaatcactaaaattaaaacaaatgtatctattcaaacttttctttagggtttacttgctgaataatttaaaaatgaagtattaggtgtacatgctttcagaattgcttttgaagaatattaaaagtataatctgaatacgatgacagaatgaataggtaaactatgacaagaagtcatcaaggttatcaaataaatatatcccagcggttgagacgactcactgctgggattttattgttagttatttattctaagtgttgcatttggtagccgattctaggatgtgtgatgattaatttcttttcagtgtttgggtcttgcgtataattcaactttttacgtaaagaggccatatgtacacgtaaggcagccatttctgtatgattgacatagccatagagtgattttaataacacttgataggttaatactttgccgacatgatggcataatatcgttaggagttggaattcattcggtgttagatgtacggactgttcattgacaaggactgatttcgcatcgaaatcaatggttaatggaccatttgtgaaacgactttgaattgtctcagtagaacgtgacatacgtaatgctactctgatacgtgctcttaactcatcgatattgaaaggcttagtcatataatcattggcaccgcgatctaatacttcgacaatggtttgttcctctgttcgtgcactaatcacaataataggtgtgtccacaaagtctctgaattgctgaatgagagataaaccatcaatatctggtaagcctaaatctaataagataatatctggttgttctgttcttaggcgaaagtccgcttctttccccgtcttcgccgtaaccactttataataattcatagttagcgcaacatcgattaaatgtaaaatcgcttcatcatcttcaacgaccaataatgttgttttcatccatggctccctccatttcaattggattaacagtcaaataaaaataaaaaatactgccttgtggtgtattcggttgatattctaattcactgttgtgttgtttcaagatgagttgtactaaatagagccctaatcccaaactatcttttttattgtctttaaagttgtctcctgaataatagggattaaaaatcaattgacgttcttcttctggaataccttttccgcaatctatcatttcgaattttattttgtttgtttcatgttgaacgtgcagttttatttcagaatgtgattctgcatgctttaaagcattatcgataaggttgaatagcacttgcagtattaatttactgtcgatattaatgagtgaagcgtcatcctcattttcaataatgacatgatttgcttggtgtctgcgtatgaggccttcttcaaattcttctagaagttcttctactaaataaggggtgcgttgtatttgaatgtcagagctttctaacttagtcaaagataaaatatttgtgactaaggtatgcagatattgtgcttcgccataagaagcagttaagagttctgcttgttgttgatcgtttaaatgctcgttatggtatttcagcatatctaagttgcccataatggaagtcagtggtgttctaatatcatgtgaaattgaatgcaagaagtttgaacgtgtggcttctcgttcagctttcaatatggattgtctggtttgttttaatagatccacattctctattgccagggtaatatcgttcaacatagagtctaatattgaattgtcataggtgtcgatgtaagtttcgtcggtgaagcggatagaaatcacacctttgactggatttgtgccaatgggaatacacaaaaatttactgccaggaaaggtatcggttaatttaccggcacggctttcattttcaatgacccagctcaatgtctcagcatcatgtgtcttatctgagcttgaaatgcttctgtttccaaatgagttggaagcagcgactttcttactttgaattaagaataccgtgacatcctgattgagtagctgatgaatctgatcaccagcaatatttaataagcgttcaattgaataagattctttaatggactggttaaattgcagcataatattggtccgatataactgccgttctgttaaggaatgctgatgttttaaattctttaagatggcactcgtaaagatactagcaaaaatactggtcgcaaacgtaatcggatattcaaagcgatacatttctaaagtgaatcttggcaccgtaaagaaataattaaaaacaaacacatttaagatagacgcaaagaatccgattaaataggattgggtccaaatagaaagcacgataataccgataaagaacatcagcaagataatggcactggattcgcttttatctaagttgtaaacccatataccgagcaagacacagatcgtttgaattacaagcatcttcataatctctacagttaaacgagaggatttttgagcttgcttaggtgtatttgtaggtttgtctgaatgaatataatgaatcggtacaatttctaacttgaaatggtgtggtacgtgattaatttgttcaatgagtgactgtttaaagtaatctttccaacgtggctgttctgactgtccaaggactagcttcgtcacaaaagcgagatcacaccaatcggttaacgctttcgcaatatcttgtgcatacaacactttgatttctgcacctaacgctttggcgagcattagatttttatggacataatgatcttgttttctgctttctgacggtgtctcaaagacatcaatatacacagctgtgaatttagcatgttctttataggcagcacgtcttgcttctcgtatgacccgttcgttataaatactgccgctgatagctaccgcaatatgcggtgtaatgtcggtatgtttagttttatattgttgtcctttttgactcataatatctgcgacagttctgagtgtaagttcacgcagctctgtcagattttcatacgtaaagaaattagaaaaggctgtttctaagcgttcttttttatatacttttcctgctttaaggcgctgaatcaacatatttggtgaaatatccacaacttcaaaggcatctgctgacgtaatgaattggtcgggcacacgttctgtaacttgaatacctgtcattaacgcaatttgtccgcttagactctcgatatgttggatgttgagtgttgtccagacatcgataccatgcgatagaatttcttctatatccttataacgttttaaatggcgctcttttgaaatgtttgtatgtgctagttcatcaattaagaccacatctggattagcttctatgattttagagacatctatatagtgaaaggtgtggctgccaaatttacggctggaggtcgaaatttcaggcaattgttgaaccagtgcattggtttcagggcgttgatggggttcgatataaccaattttaatatctgcaccttcttgatactgatcaataccatttgataacatttcatacgttttacctacccctgggctatagcctaaataaatggtaagtttccctctttttttatatgtactttccatgaggcaccccctcttaatcacatcataattaatatacaacatattatccatttatctttctgttttgttaatcatctttatagtttctttataactttccttaaatgttaatacttcgattagataactcttgttaagattttgatgaaagtaaggagggagcgcaatgattacactattagctgtcgttgtcatcgcattaattttatttttattttacgcattaatttggagtgaaaaattttaacagagaaagagggaagcatcatgagtattgtgttgtttttgattgtatttatcttgctctcactcattgtgagccgatatttatattcagttgctttaaatgtgccatctaaaatagatgttgtttttaatccgattgagaaattgatttatcaactgattggcacgaaattagaacacatgtctgggaagacgtatatcaaacattttttgttgtttaacggattgatgggcggattgtcctttgtattattgcttattcaacaatggctgtttttgaatcctaaccataatttaaatcaatctgtatcgttagcctttaatactatggcatcttttttgaccaatactaacttacagcattatgcaggtgaaacagatttaagttatttaacacaaatgtgtgtcatcactttcttaatgttcacgtcagcagcgtcaggttacgccgtatgtattgcgatgttaagacgtttgactggaatgacagatgtgattggtaatttctatcaagatattacgcgttttattgtacgggtgctcatacctttcgcattgatcatcagtttgtttttaatcagtcagggcacaccgcaaacgcttaaaggtaatttggtgattgagacattatcaggtgtgaaacaaacgattgcatatggaccgatggcgtctttagaatctattaaacatttagggacaaatggtggtggtttcttaggtgcgaactcttctacaccttttgaaaatccgacatactggtctaattacgctgaagctttaagtatgatgttgattccaggttcattagtctttctattcggtagaatgttgaaaactaaactacagattcatccgcatgcgattatgattttcgttgcgatgtttgtaatgttcatcggctttttagtgacatgtctctattttgaatttgcggggaatccagtgttgcatcacttaggtattgccggtggcaatatggaaggcaaagaaacacgtttcggtattggcttatccgctttatttacaaccattacgaccgcttttactacaggaacagttaacaatatgcacgatagtcttacaccgctaggcggcatggttccaatggtattaatgatgttgaatgcagtttttggcggtgaaggtgttgggctgatgaacatgttgatttatgtcatgttaacggtctttatctgtagtttgatgattgggaaaacaccaagttatttaggaatgaagattgaaggtaaagagatgaaactcattgcgctttctttcttagtacatcctttacttattttggttttttcagcactagcttttattgtgccaggggcatcagatgcgttaactaatccgcaattccacggtgtatcacaagtgttgtatgagtttacatcatcttcagcgaataatggctctggttttgaaggattaggagacaatacggtattttggaacatttcaacaggcattgtgatgttgcttgcacgatatattccaatcgttttacaaattttgattgtatctagtttggtaaataaaaagacctatcagcaacatactcaagatgtaccgattaataatttatttttcagcagtgtattgattatctttattattttgttgagcggcttaacgttcttacctgacttaatgcttggaccaataggcgaacagcttttgctgcacgcatagataaaggaggattagaaaatggctgaaactactaaaatatttgaatcacatttggtcaaacaggctctaaaagacagtgtattgaagctctatcctgtttatatgattaaaaatccgattatgtttgttgtagaagtgggcatgctgcttgccttaggattaaccatttatccggatttatttcaccaagaaagtgtatcacggctatatgtgttcagtatctttatcatattattactgacacttgtctttgcgaacttctctgaagcattagctgaaggtcgcggtaaagcacaagccaacgctttacgccaaacacaaactgaaatgaaggcacgtcgtattaaacaagacggcagttatgaaatgattgacgctagtgacctgaaaaaaggacatatcgtacgtgtcgcgacaggtgaacaaatcccaaatgacggtaaagttattaagggcctcgcaacagtggatgaatctgcgattacaggtgaatctgcacctgtaatcaaagaaagcggtggagatttcgataatgtaattggaggaacttctgtagcttcagactggttagaagttgagattacttcagaaccaggtcattcatttttagataaaatgattggtttggttgaaggggctacaagaaagaaaacacctaatgaaattgcgttatttactttattgatgacattaacgattatcttcttggtcgttattttaacgatgtatccattggcgaaattcctgaatttcaatttatccattgcgatgctgattgctttggctgtgtgtttaattccaacaaccattgggggattattatcggctatagggattgcagggatggatcgtgtgacacagtttaatatcttggctaaaagcggacgttctgtagagacttgtggtgatgtgaatgtcttgattttagataaaacaggtaccattacctacggcaaccgtatggcagatgcgtttattccggtgaaatcatcaagctttgaacgtttagttaaagcggcctatgaaagttctatcgcagatgacacaccagagggacgtagtattgtgaaattagcttataaacaacatatcgacttaccgcaagaggtcggagaatatattccgtttactgctgaaacacgtatgagcggtgtgaaatttacgacacgtgaagtatataaaggtgcaccgaatagtatggttaagcgtgtgaaagaagcagggggacatattccagttgatttagacgctcttgtcaaaggggtgtctaaaaaaggtggcacaccgctggttgtgcttgaagataatgagattttaggtgttatttatttgaaagatgtcattaaagatggactcgtagaacgtttccgtgaattacgtgagatggggattgaaacggtgatgtgtacaggagataacgaattgacagctgcgacaatagcgaaagaagcgggtgtggatcgctttgtggcagagtgtaaacctgaagataaaatcaatgtgattagagaagaacaagcgaaaggtcatattgttgcgatgacgggtgacggtacgaatgacgcgccagctttagcagaagctaatgtaggtttggcaatgaactcaggaaccatgagtgccaaagaagcggcgaatttaattgatttagattctaatccaaccaaactgatggaagtcgttctaattgggaaacaattattaatgacacgtggctcactcactacatttagtattgcgaatgacattgcgaaatactttgcgattttaccagccatgtttatggcggctatgcctgcgatgaatcatttgaatattatgcatctgcattcacctgaatcagcagtattatctgcgttaatctttaatgcgttgattattgtattattgattccgattgcgatgaaaggcgtgaaatttaaaggtgcctcaacgcaaaccatattgatgaaaaatatgttagtttacggcttaggcggtatgatcgtgccatttatcggcattaagctcattgatctcatcatccaactctttgtctaaaaggaggacaaaacaatgcagacaataagaaaaagtttaggactagtactgattatgtttgttttatgcggatttatcttcccgctgactgtcacagcgcttggacaagtattatttccagaacaagcaaacggcagtttagtgaaacaagatggcaaagtaattggttcaaagctcattggacaacaatggacagaacctaaatatttccatggacgtatcagtgcagtcaattacaatatgaatgcgaatgaagtgaaagaaagtggcggacctgcttcaggcggctcaaactacggcaattcaaatcctgaattgaaaaaaagagttcaagagactattaaacaagaaggaaaaaaaatttcaagtgatgcggtgaccgcttctggctctggtttagacccagatattacggttgacaatgcgaaacaacaagtaaaacgcattgcgaaagaaagaaacatagatgcttcaaaaattaatcaccttattgatgaaaacaaacaagcatcaccaatggcagatgattatgttaatgtcttaaaattgaatatcactttagataaactctaaataaacagggagtgaggtgagacatccatgtggttcattagcattattattttaatagcattcctaattatattaatgattgacgatttaattaaaacatgacaacttcacgcaaaacaatatgaattggatgtaatagagaagggagtaccaagaaatactcagtttattgaggataattattaggggagattagagaagaattctctattcacgaacattactttaacagttgtaatcattggtttcatcatatcgattaatagtacagtcatcttgagattttcaacacactattatagctagctaagatacttttaaattatgacttatttttcatcatttacgatacatcattctcgataacttactatttgttatggtatttatagatttaaagaaagtgaaggagattaagcaatgtaacttggcttaatctctttttgattatatttattaaggcaaagcttcatttcccttaaatcaagtatatcttctgaataagcaaatgaaatcgtgacgccaactacagtgataacttcgcctaaaacacaatgagtgtggtgttttcacttttcataaactcctctaagtttgtgtttttaaactgtgatggatttgaatgtttttgaattacgttgtcgcgtccttgggattgcaatccaagaacgtcagcataatctaaatcaattttgatttggtagaagacaagagaagtacttttgcctgtatcatctttcgcatttctttttgttgtctttcgatcccgatcggaaactaattttcctgcattatccaaagcatcaataacatttttcgtgtcttcgaattgactgtctgttaacatcttatcgaatacatttcggataatttttacttcgatgtagtcatctttaagtgagaggataccaaagttttgaatcatattagcaagacgtgtttgttgtgaaaacttgcccaggttttccgcaataaactgtacgattgtatccatcgctttatctgcaagagaacgttctgacaccgtttcattatgatagcttaataaatagttctttatgctgctaacgtttaactgtaggtctagtgattgatttaaaatatgggctgttgttgttagagttgcataatgtttaatcattcgaataccagtgttactggattcagttgatagtaattgataaaaaacactgtcttctttttgaaaaagggaagtaacatcattagtgttgtctaataggaattgagcaattataggtaaaacatgaccattattttgactaaccactttttttatagtatctgagttttgagcacttgatgtgaatttttcagacacctcaatagtacgaacacgcaaaccatcatttttagctggatttttgaaaatactatgttcagaagttgaaatcactgatgtatcctagtttttaggtgttttgacatcaccatttatatttgctctttgacgtccttgtccctctgcaaatgaatatagaagacctgttgtatcatgaaatgttgccgctgataattcatctaatactatgggtacaccataatttccgctaagatatccttctagtgcatttcttgttgcattccaactccggaataggttttcagtaccttttgttgggttgccagctaccgatgcggctaacatagcggctgtcgattttcctgttgatgattggccagtgaaagagaaaatagttcctgaaaactcgacgttattatgatacttaaggaaagcagtgactaatgaagatacgccaaacaacacatctagttctaaagataagttcccatggacttcttctttatacatttgtaaccatcctgataaattgccttttggtattaaatcgtacttgttatcacatataatagaagtgctattagtaatctcattagaaaaataaggctggtctaatgaaattaatggtccaagtaatgtatgaagcattcctacacctgagtatattgttgataaaggtgtggtgcttctcatttgttgcagtacgaaccctaaatctctaatgtgcttttcattaatggtaaatccatattcaattaaggagggtaattgcaaagcagtaaggattgaagccttttcgacaagctctatattattcaaatccgaaagaaatactttttctttacgagtcgcggggtctataaaacgatctgtgaaagcaatcggtccagataacattatttcaaactccgtacccccatcttttttaggagggatggttttgtaccatcccgaaggtttgagcttgaattcgtcagtttgatatagaattttttccattaacagtgacccccttggttgtaagaggaaattataatgatatgtcggtacttaagtgggttagttcctataataatgaaagggatgcttggtttgtactttatccaccaagcaaagcgtcttcctgcttcacgttgatcgttgatgttgcactgttctctgaataactgtaattataaggtttagtaatggcaattttttatttaaacaaatttttacgaatggattgtctgtttattaattcagcaacgtttattgaagaaaaataagtgtcttctgataattgcaaagggtttaattcaatgtaaactgaattaagggtagggtaggtatgcctgttttttggttcttttaagttcaatcgattaataaaattgttgaacctttgttctaagtcatacaaaaacatcagtaattcattaggagaatgatttattatgcaatccatattttcgtttatgcttgaagttatacatctaaaaacagtattggtttcttcgtataaaaataacttattaatagaggtaacattgattaagactgagtatacgtataataagagtgactctgacatctcatttagataaataagactgtgatcattcttatttacgattattatatgtgattgaatcaattcaataatgtctagaagaagacttgaaaagtcgctgttaatcttggtctttgaaaaatcatcgtgaccatttgtcttattacttagatgtagttgttcgtattttatagtttggcggttgaggaattaagcatttgattattataaactatctcaaaaattaaattacctccttttttcttcctcgatgaaggtttatctaatcttccaatatacaggtttttgaagtaaattatagatatgataatcattaattcagtaaatgtatacttattaaggggtggagctttagctaacttatcgatagtactgccgatgcgtgctttgaaactattcaaattgtcgtgactgtctatatctaaatcttcaaatttactagcaagggtttgcaaagtagaaattacaacttcttcttttgtataatatttattgaaaatatcatcttctttatcatcgctttggagttttaaagtgcctggttctaagatgtcaaattttttgtttcgattggtatttttttaaaatgtgccttgtatttttggggttgttccaaatgtgtatttgctagactacctgtaattgatattgctttatttagcatttggtgtgtattaactgtatctgattcttctggaaatttaaatctaaaagtaaaatctctactaccgaatgtactttttacggctacagttttgtacttatgctcaggcaatgtaattaaaccatcttgatgcaggaggaaaagtgtgtcatcatttaatttctcaattgtattaaataagtaattatgcatagcctctttatacatggcgaattgataatttagattatcccattctattagttgatttaaaatacaatatagaccttcattcaatcggtttacgaatatcaatacagcttcttctcgtccaacaaggcttattaactccttcaagtcatcctttaattttaatttttctccttcaaaattgtattgagtgaagcctatagccttttgaaaagtaacttccatgacagagttggtttcagaatattctaacgattcatttattgcaaaaatcaaattttttataaatatggaattactcatggtttgtaattgcatatactacccaactttcttatttactttaaaacaaatataagctaaagtagttattatcataaagggaacgtacgttcttatttagctgatttctatgaagagaggttatggatattgaatgaagaaatcttacgcgaagtagcagatatttttataggtgatgacagagatagcatttatgattataaaactgggaacgaattagtgaggttttttaatcattactttaataaaggggacatatatcaggctccgtttccatctagatggctatatgttgtgaaacatttgcaaactctgattcaggagagaaagatcaatcaatttttcacattaattttaagcaatcactatattaagtatgaactgaaaattgacgaggttgaagcagcaaagcaggctgctaaagcacttaagttgttcaacaaaagattaaatcattatgggtactacataacaggaactaacaatgctagatattttatggataaggatgaagatacggagtctattggttatggagggtatgcgaatatttatttacagaagtctacaggtcttgctgtaaaaaaattgaaagaggagtatcttactgattcttcaattaaaagtaggtttaagagagaatttgatctcactaaatcttttgatacaaatccattgttcattaatgtgtttgaatttaatgaatcagattattcatacacgatggagttagctgatgaaactttgaaagattacattgaaagcaagacaattagtgagctagaaaaagtaaagataataatgaaaattttaaaagcgatgagtcaagcacatagtgaaaataaaatacacagagatatcagttctaaaaatgtattaatgtttagaggaaaagtcaaaatatcagacttaggattaggtaaaaaccttgatgaaattcattcgcatcaaacctttgatacaaacggtgtaggacaatataaatactgtgcaccggaacagatgtatagtttaaaacaagcagataaacaatctgatgtttttagtttaggaagattgataaattttattatgactggaaatgtagttaacaaccatcacctatttagaggtgtatctgataaggctacgaacagtagtaaagaatacagatttgaagatgcaaatgaaatgttgaaaatgctgcagagaattttagagtatcacagtagtgcaaagcacgtcgaaaaatgtcaagaaaagctgaaaagaggagtgtttgatgatgaaagcgaagaatttattatgacacgaagtgatgaacaattatgtcaaatggttctaagttctaataataatgagcaagcgtgtttaattcgttatatgcaaaaaaacgaatcttcagcatgtgatttaatagagagtattaatagaaagtatcaagagttttgtggaaggtttgaagactacgatccttttgctaaattagcatatatgattttatgtaataacttcagttatagagtgaatgaaacagcagctagagtgctaaattatgttgcttggtctgtaaatagattttcggcacaagacttaattaaaggtttaattaatagaggagtggagcctttgattgaagaaaaattaaaggacaattaaaaaaacctcatcattaactgatacgcagaggcgtatcataagtgatgcttgttagaatgatttttaacaatatgaaatagctgtggaagcttaaacaatttgtttatctaagtacttatttaataattgattgaactgtgattggcaccaggctgtctggtaaattgagaagttgggttttggagcgtataaatgatagaattaatataaaattcaatttgaggagtaggagattatgtcgaatataaaaacaacactagagacgtccgtaggactagaaaaagacaacgataagctatttgattatataactgaattagagattcaaaacacgcctgaaaaccgggaagcaaaagttgttattgaagaaaggttacataaagaatataaatatgaattagatcaaatgacaccagagtatggaatacaaaaaggcagtgttagaataggtcatgcagatgttgtaatatttcatgattctaaagataaatctcaagagaatattaaaataatagtagagtgtaaaagaaagaatcgcagggatggtattgaacaattaaaaacatatcttgcagggtgtgagtctgcagaatacggcgtttggtttaatggagaagatatagtatatataaaacgattgaaaaaagcaccacattggaaaacagtatttaatataccgagaaatggagagaacttaggactacctgaaaaaaattcactatctccggctacagaattagttaaaatatttgaaatttgccataatcatgtatatgcgaatgatggacatttaaaagataaagtttttaatgaaatgttaaagattctatttattaaattaatggatgaaaggaatcatacttcaagaattgctgatttcggtataactgaacaagaatatgatgaaatattaaaccataaagaaaatgattttaaagtgcgaataaataacttatttaacaaggctaagaataattaccaagacatttttaatcctaatgaaaaaataaatttaaagctatctacattggcttttgtagttggtcaaatgcagaactttgatttatcacattcatctagggacgttaaaggtttagcattccaaaaatttgtatatgctcatcaacgtggagatagaggtgagttcttcacaccggatcctatcattgagttagcagttaagatgattaatcccaaaattgatgaaacgattttagatccagcttgcggtacaggaggttttcttgtagcagccttaaaacacgtagaagaatcaataatagatttaaaagctgagagacctattgattttgaaaaagcaaaaacagattatgcacttcgaaaattgagaggtatagactttaatcctgacttagtaaaagtttctaaaatgagaatgattcttgaagatgatggtcatacaggaatttttcaagctaactcattagatactttgagagaaatagaaattcaagcattaaaatcaggagcaaataatattaatgagaattctgtcgacatcatcctaactaatccaccatttggacgtaaaggaactattacagataaagatattttacgacaatacgagttaggacatcaatgggtaaagaacaatgatagctatgaaaattcacataaggttctagatgatcaggtaccagatatactatttatagagcgatgctatcaattcttaaaaaacaaagggaaaatggcaattgtattgccggatagtgtgttaacaggtccgaaattacagtacgttagaaactatatcctgaaacgttttaaagtagtaggagtagtttctttaccatatgaaacgtttattccacatggtgccaatgttaaagcatcaatacttttacttcaaaaactagattctaaaacaatggaagaattaaatacagatggctacgaatctttcatggtagatatagagaaaattggtttcagggaaataagaatggtacattaatttataaaattgatgaaaaaggtcagtacatattggatgaaaatggaaataaaatattagatgaagaaataagtgaagcattagaaggatggactgagtacgaagcagtaaatgaggtgtggagttcatgaagcaaggagttgtaagttctaagaaattatttagaagactcgatgttaaataccattttaatgaaaataaagagatagataattatgataaactttgtgatttaaaggaactcattgtaagagatccgaactgttatggtttccgttatagctcagtaggaatacctatgataagaataagtgatattggtaatccttttattaattatgataatgtggcttatgtaaatgagaggattcataataaatataaaaaaactcaattacaaaaatttgatattcttatgtcagttagaggagtaagtataggtaaaatcggtatttttatgggagaatattcagaagctaacattagtgcgaatttaataataattagattaaaaaatccatcgtatgctccttatgtagcaatgagtctcatatcttctgtcggacaaagccagataagtagaagtatcggtggtggatcgaaaccaacaattacctcaggatttattgatgaaatagagatccctacacctcctgaggaagtgcttaaaaatataaatcaacttttctttgaagcatttaatcaacgtgggttagctaaagaatctacagaaataatagattcagtttttgatgaattatttaagtatgaagataataaaaaatctgtaagttatactaaaaatattttagataataaccgatgggatagtcattaccataatcctaaatatataaatactagacgaaaagttgatgccgaaaatgcaaaatatttaaaaaatttagttactgaagtgacagagagcgtcgataaacttcacgaagataaagtaggttatatagaaatttctaatgttaataatcgtactggtagaatcaacgggataaaatttgattacattaataaactaccaaaaaacgggaaaataatattgaaggatgaagacatactaatatctaaagtccgtccatatagaggttccatagcaatttataaagagtatagtgctgaattatgcacagcatctaaaagtgcttttgttgtgattagagcagaagaatttatgtatccttattatttaacagcttttctcagatatcgattaggtcttgatcagatagtcatgaatcaatctggaacaacttaccctactgtaaagccagaagagattatgaatgtcaaagtcattttgctagaagatatgaagatgaaagaaataaatgaaatttatcgtaaaaatatcgattcaaaatatcatgaagaaaaaaatatacaaagtattatagagctactagaatcgagtttctcataatctgtaaaacggaaatcaattcctgcttttcccatgataacttttacttccttttaaatttatacgaaggttaacttcaaaagtgtcgaatgacttattattcaagtaattgtaccatcagcactgagttctagagaaacatcatgtttagatagctcgtcaatttctctgtcgtaaagatattctctattttgatcaatgattttcattttaaacagcagtttttttagttcatcagcctcactaagatttgtaaaatattgaattgaaacatagaaataagcggtacttaacatgacagccctcattcatttagttcgttaaataaattataaagtttaaatttgggctgtacacttttaattgtaaataataatggtttttatttaggttataaacccataattggataccatctctttatttaaattctttgctcctggcatcctctgaagtaaaaggatacaggtatggtggagtagtattgagttttgaactcgtgaaaataaattatcatcctctttattgtgatagggagtgggacagaaatgatattttcgcaaaatttatttcgtcgtcccaccccaacttgcattgcctgtagaatttcttttcgaaattctctgtgttggggcccctgactagaattgaaaaaagcttgttacaagcgcattttcgttcagtcaactactgccaatataacttcgtagagcatagaacattgatttatgtcccagcctgcaataattttttaagggaagtgaatatatatgattacccaatcattaaagacagttatcaatttttcaaatgaaaatttttttcaagattacttaaataaaaataatatgtctttaaaaaaaacagaaattgaagatataaaaaaatttgtggcattattaaatggaaaattagaaaaaaatagtaacttatttagggggtatatccttggatattcttttcaagatttaacaggagaatttgatttattaagatttactgaaacacatattattaacattgaacttaaatcacgcgataccactgaaaaagaaatagaagatcaattaaaaagaaataagttttatttaggaagtactaattacacacttttacagtatgggtttttatcatcagaaaataaattatataaattaaatgaagaggacttattgcgagaaataaatgtagaagaatttatcagtgaatgttcgaacttaaaaaataaattatttataaatgtagaagagttatttagaccagaaaaatttattatttctccatttaataatactcaagaatttttagaaggaaagtattttttaaatgacgaacaagttaaaataaagaaatgtttaacccaatttttgaataatgatgactcaattgttaaattaacaggtgtgcctggttgcggaaaaagtttgattctttatgatttttacaaagagtgcttaaaaattgataagaaagttgccttaatgcattgtggtgctgagttgaatgacggacagctagatttaataaaaggtcatgattggaatatatatcccccaaaggcaaacgaagagtttatatctttagatgctgacatctatatgattgatgaagctcaacgtaagtatcctcatcagttagagaaaatttattcttatattaaagaaaatgataaaaagttaattatttcttatgatcctgaacaaacattggtgaaaagagaaactaaatggaatatttctaaaactatagcagaagattacgaaggtaaaacattaaatctagaatccaggatacgtaataacaaagaaattagtagttttattaggttattattaaataaaaatcaatctaactatattcgggattttaaaaatattgaaatagtatatgcgaatgatattagtgaatcaaaaactattttaaaatttttagataatacatataccgttattgattacaccgctcctaattttaatagaaaaggctataatgaaatatctaacatgagatacggaaatactatattgaattctcataacgtcataggtcaagaatttgataatgtgtgtttaatcttaggtaatgaatttttttatgataatgatgggttcttaagagcgaatgatgttaatgatcaacttgatcttatgaaattactttatcaaaatgtgactagaacaaaacataaacttgttttagtagttaataggaataaagagttatatattgaccttttaactatactaaaacccagaattcagaagtcaataaaattaaaagaaattgaaaatataggttacaatacaataccaaattcaaaaggtgtgttttatatatttaagcataataacaatattttaaaaaacgaaaatactggtgaagatattaatgttaaaggaaatatattatatgtagagagttgtaaagacttgagaaaggcaattaaaagtttaataaccaatattataaccaaaaaattaaaaaaatttgaagatattgaaatcgctgatttacttaatctaaaagtatcgtggattgatagcaaaaataaggaacaaatattttcttatattgttgagcaacatatagaaaagtacggagaaattccttttttaaatatacctttaaaattaaaaggttattcagataatattattagaaattatagctatattgttgaatatgattaagtctattaaatatcatttatagtaaatttattaataattaatttatactatataaatgaagataaagttatcgtaaaacatctattgctaattcctcaggcgttttttactaaactaagagtgaaccatcatcttttataattattgcaagtttatcttcatagactaacaactaaataatagttgaagtgtttcctaaatgtttgattgctgcttagaggtgatatacgagtaaatttcatctcgtcatatttttatagaaatcttttcatgattaccggaattatatcttagaataaaataagacatattgctatcatttactttttattaaccgcatcataaactgataagtagaggcgtatcataagtgatgcagtttttggtattccaataacttttagttgaagtttcattagaaaaggtttaatgaattggacattccctgtgtaattttattgcaaagtctattatcataaagatatatactaaatttcgatgtatggagagattatatgagcgccaacatattagatgaaatcagtgaaatactaagtggagtagaaaaatattggataaatgaaaaactagcaaaacaaataataatataagatttacgtaacaacgatactaaattaatttctaagcttttagctaataaatctattaatgaaacatatgttcaagatatagatggctataaaatattcgataaagaagcatttatttcattgttacgttataaaaatcactggcaagatagctatactaagtatgctaataaaattggtttaacggcagaaggtaaatatttaaattataattctgatgtggttttaaattttcgatttaaggactgtgtacttgaaggtggaatgactaaagaagatagtatttttagattgtcaaattaagctggacagtttatcatcttcgatgaaactcataaatacttccaatggtgttctataacctaaagattttctaggacgatgattgatcttttgagcaacactaatgatatgatcgtctgttactaaattgaaatttagttctttatctaatccactgcgtctaagtattccgttagaatgttcctttaaacctcgctgtgatggcgtgcctggatcagaaaaaaatatagatatatcgtgacagttgcatattgttttccagtttgagaactccttactacaatcaaaaagtaattgatttaaatatatgagaaagtaaagctgcatacattaagtgcagagagttttctttatcagtttctttacgacctaagggtcgtaaggtgataatcatcttggatactctttctaccaaagtaatgattgcactaccatgacgacgaccaacaatagtatctccttcaagatgtccaaactccttattgaataaaggaaattcttctattctttcagaaatatgtcttttaaaagtctgtctgcctctttttcagaatgaccatttagctttcttttacctttcataggtaaatcatgtacagcaaaaatgttctctttaaacattctgtaaagtgttttaacagaacaattgatcgtgcgttcacctctgccaataatagtatcaggtgtccatccatcagctactttctctcggatataatctgcctgttcttctggaagcaccattctatgtctcccacaattagactttctttgtttatattcttgataatattcaagggcagacatactcgacttaaaagcattgattacgttataaattgtctgtctagtactcgaaatctctttaactgaaagattctggtgataatatgagtctatgaacgtaagttcatccgtgttaagatgtgtataggccattctgtactaactccttatgttttctttggtaggaaatacatattgagtttagcacagaaggcttatttatttgtctaacttaattttacaattggcgaaatgaaaaaataatcaacgttttgttaaataatagtagaattactattaatgaattaagtaaacaagtgaacttatctgctccagctgtaagagaaagggtaaataaacttgaagatcaaggtattataaaaggttatacaattaacatagattataaggaattaggttacgatgtagaaatattaattgagttaactataaagaataatagatacaaagattttaaagaatttatttcaaaacaagataatgttgagttttgttatcgtgtatcaggagaggcatgttttgtatttaaggttcggttggaaaatatggatgaagtagaaacatttgttgataccatacagccatatgggcagataaaatgtcagtttatcttttcatcagttgtctaaactacatggaaaaagtttaataagcataggaaagattattaacagagagaagtgacttagtttggaatataaatcttacaacaaaatgagtaatactattttatctatcttgttgagtgaaaaaaatttcgataataaaatggtagtctcaacaggtagttacattttgtctgagttgccatgtattgttgcctataaaaataatgatatcgtggggctactaacgtataaagtttatgatgagtacattgaaatcatttctttagatagttttgtagagaacaagggtattggtagtcatttacttaattatgctgaaataattgcctcagatatgagtaaaagaagtatcagtgttattactacaaatgaaaatattaaggcactctatttctatcaaaaaaataaatatagaatcacagaagttatttttgatgctgtaacagaagcaaggaaaataaagccgtcgattcctacaattggtaaaaatggcattgaaattagagatgaaattgtattgaaaaaatgtttataacgtatagatatactcagctttaaatcaccctagttcatacaaaaagactttaacacaaacaaaaaaggaggaaacttaaattcctcctttcccttattacacctataattctattttaacgtcttcgtccatttgggcttcaaattcatctagtagtgctcgtgcttctgcttaatttgaatcatacaaggtgttttttgttattcctaaaatttggcatagctcaataaacctgtattatctatttgtcttttttggcatttatgataacccaagtatcttttggaacggtaactgtagttgttgattgaattaattcgttttcactttcatcgaagcttagtaatgatttatataaatctgatttccaaacccaaacttctttttgagtttgctgtgttgctttatcagtattcttcacttcatatttagcttgatgcttaatggactcagatatattatttttatccattttaggcttgaaatgagttgtaggttttttatccttaggatgatttctatagaccatgacatagttatttgtattttttcctatttcattgattattaatatattagctggattatttttaggaccaccagtaaaaatttcttttttatttgatgtgattactttcttttccataccccaatggttagtcatattagctgtaataccaatgattgttagtgtcaacgcaagagtaaataatgttcctaatatatagcgtgtgattttatgaggaattaataaccaactaacaaaagtacataaagttaaaacaatcgttgttatcatattatttatcctcactttcaataatattcatttttaaaaatggaactaaaatgatacctataattgcaaagaaaatgccaattataaatgcagtattaaagccatcgattgatgcttgttgagcaaggtgtgcatatttgagtggattgctttcttttaaactatctgcaggcatatggttgttaataatattttgagtaacagatgtcagtaatgctactgctatagatgatgctacttgtctagcagtattatttactgctgtagcatgtgtacctttttcaactggtaaagcatccatcgcatttgttgtgagtggcatcattaaaattgccacaccaaacattcttactgcatatagaacaagaataagtgttggtgatgtgttaactgttaaaaatccaaatggaactgaagctaaagtcaaaatagtgaaaccaacgaacgctaatcttttaatgccaattttattgtacagtattcctgaaattggagagataaatcctaacatcagcgctccagctaaaagtgttaaaccagattcaaatggtgagaaaccgtgtatattctgtaagtaagtgggtaacatcatttcaacaccatacattgccatagttacaacgattaaaccaattgtcgctatcatgaaacctttagatttaaaaacgcgtaaatccaagaaaggatctttagattttaattgtttgataacgaacaaagtgagaataaagatacttaaaaaaattggtaaaataacgtaatttatatttccccatccttcgcttgcaacgtttgaaaatccccataaaaataatccgaaaccgatacaagaaagtattagagaatagagatctaatttaagtttacgattaggtataacatctttcatgaagaagaagcttaatataaatgctatcgctataataatgattggaagaacaaaaatattacgccatgagtctgaaattgtaatacctagtaccacgtggtttttgtttaatatccaaccagcaaaagttggacccattgcaggtgcgagacctactgctaaaccactcagacccattgcagtaccacgttgttttattggaaacatataaataatgatgatttgtaacaatggcatcattaaaccaacagcaattgctgtaacaatacgtccagctagaaatattaaccagccatcttgatttgatggtgcgattgcagtaagaattaatccgaataatagggcgccgtaagagtatacatgtaacaatctagtagatatacgcgtcgctaaaaatgccgaaagtggtaccataataccatttgcgagtaaaaaccaagttgttgcttgttgagcagtactaaaatcgatatcaaaatcgttcatcaaagtaggtagagcggtacctaatgaagtctgcatcaatgcaccagagaatgtagctaataatataatgctcattataattttgggtttatattgattgccatgaatatctaaattcattgcattacttttttgagtagacataaagccggcctcctatagttttttaaaattaatactttgaaaatataacacctactttataaacagaacagaacaaaatcatatactttgtacaatttgagacactttgttttattttgtgttatattcatttataggagtgattatatgggttataaaaggaaaacggtcttaactcagcgtaatataaaaaatgctttagtgagtttattagagaacaataagtttgatttcattacaatcaatcaaatagtagaagaagcggaaataacaagaagtactttttacaggtattatgatgataaatatgaattaatatcagaaatagaagaagaaattttagaacatattcataaagaaaggcaaaagatagacgagaacgcttcagagaagaatttattagatattgagatgtttaaatatctgtttgaaacattagagccatattcgaacacgatatatcgattgttaggatataatggtgattccagttttgagatgaaactcaagaatgaaatatcaagaagatttatagatatagaacaacgtaatcatatttctcaagtacgagcagacttagtaaaggaatatgtatttgttattatgataaaaacattacaatattggtcagctcataaagacgaagtagatattgatgaaatagctttaacaattagggatatccagttaaaaggattaagaaaagcaatagggttataattttaatgaataacaaaaaaggaggaaacttaaattcctcctcaacctttattactcatactataattctattttaacgtcttcgtccatttgggcttcaaattcatctagtagtgctcttgcttctgcaattgattgtgtgttcatcaattgatggcgaagttcgctagcgcctcttatgccacgcacatagattttaaagaatctacgcaagctcttgaattgtcttatttcatctttttcatatttgttaaacaatgataaatgcaatctcaacagatctaatagttctttgcttgtatgttcgcgtggttctttttcaaaagcgaatggattatggaaaatgcctctaccaatcatgacgccatcaatgccatatttttctgcaagttcaagtcctgtttttctatcgggaatatcaccgttaattgttaacaatgtgtttggtgcaatttcgtcacgtaaatttttaatagcttcgattaattcccaatgtgcatctactttactcatttctttacgtgtacgaagatgaatagataaatttgcaatgtcttgttcgaagacatgcttcaaccaatctttccattcatcgatttcatagtagccaaggcgtgttttaacacttaccggaagcccgcctgctttagttgcttgaataatttcggcagcgacgtcaggtcttaagattaagccggaacccttaccctttttagcaacatttgctacaggacatcccatatttaagtcaatgcctttaaagcccattttagctagttgaatactcgtttcacggaactgttctggcttatctccccatatatgagcgaccatcggctgttcatcttcgctaaaagttaagcgtccgcgcacactatgtatgccttcagggtgacaaaagctctcggtatttgtaaattcagtgaaaaacacatccggtctagctgcttcacttacaacgtgtcgaaagacgatatctgtaacgtcttccattggcgccaaaataaaaaatggacgtggtaattcactccaaaaattttccttcataatatatttataccctctttataattagtatctcgattttttatgcatgatgatattaccacaaaagacgaacttatacaaaaggaattttagttgatacaaccatttgaaagggaagtctacgagtagtctaaaatgaatgtagtggtaagttgatcaatacacagatcaaggattatcgtattaaattgttcattattaatgatacactacttatgaatatgattcagaattttctttggctacatatacagtaaagcgattttttagttatcttataacaaagacaaatttataaaggtgatattatggaagatttaaaggaatctttaaaaggtttaagttggtatgacttattttttacagtacctatgtttctactattcgtgtatctaccgaattataattttataactatatttcttaacattgttatcattattttcttttccataggtttgattttaactacgcatataattatagataaaattaagagcaactcgaaatgattcattaatacgaatgtgattaaacataaaactgaaggagcgattacaatggctactgaaaaagatataaatgatttgtttttaaatcatgtgaattcaaacgcggttaagacaagaaagatgatgggagaatatattgtttattatgatggtgtggttataggtggtttgtatgataatagattattggtcaaggcgactaaaagtgcacgtcatcaatttcaagataatacattagtatcgccgtatccaggtgctaaagaaatgatattaattccagactttgtcaaagtaataaatattactaatttatttgagtgcataaaaaatgatttgaaaaagtgaagtgcggatggagagagtcggaagtatatataaatacacacctagaaaatttagaatgtcactcaacttttctaagtgtgtttgaaatgtaatattatactatttattacaatttaaaaatagatattttttaatgcacaaaaataccgttagtttatgttcatagtatttcaattttgagagtttcttctatcgcttttttatttttaattaaagaattataggaatcggaataaaaggtaatgtaacctaacctatcatcagagttttcaggtattctgactgaatcaccaagactaacatttaaccttaccgtattaacaaattctagttgcttaattttttctaaaccatgtattttttttaatttgccatttttatgggctgtaaaataataaatcatactatatttttgacggcttttttcaaatttcaagttttcccctaaataattgaaaattgtattttggaatatattaactccaaaagatagtgggattagttgtgatgttatttcgtctccaccaggtctaccattaatttcaacgatttttaatccatcaatagtgtctattacttctatatgaagggggccattctctatgcctaaagcttttgctccattttcagcaatttttgcaaattcacttttattatcaataggtgcgggtataatatggcctaattctacaaaatatggtggctttgattttaatttttttgtgacttccaagaactctgtttttccagaatttaaaaataattcaatgctatattcctggccacgcataaattcttcgattaagaaaatgtcgttgaccttaaaccccatataagattctttgaaatttaataattcttctaaggatgatttaagttgagattgattatgaattagcgaaacgaattggctacttgcagtatttgttggctttaatactaatggatatcctattaaatcagcaaattccttagcttcttcataagatcggatagctttatattttggacttggaacattaaattttagaaataaatctctagcaatatttttatttctagcagcgattgcagattgatagcccatagattttaatcctaatttatttgctacccaacaagcgtttggtgtagcataatcagttgctggcaacaatccaataattttatcggaatatttaaaagatttaatagcattatatatatcctctttattccggatgtcacatgttattaggtagtcgtagtcatttgaatatccatatgtgattggatttgtgctgtcatttactattacaagaattttgtaacctaatctttttgtatactcaacatatttaacaccataaaaactaggttcaacaaatgcgaatattttatcttgcattattccacctctttaagtaatgttaataacttttctttactaaatcccaattgatttagtacttcagcatgtgaaccgccatggtgtggatattcatcattaggtgtgaatgggatcactgtattgtcaattaaagatgctagtaagttcgatatagaacctgtttgtctatgttcttcaactgtaatgattttgtgtcctttaagtaaagaagacaattcatttatataagtttttagcgaatctttatctacataaatcaaatgtatatgattaattttatttgatttatcatttatttctttacaaatttctgtagaaatttctccaatagatattaatgtcattttgttgtttttatcaaattctccatctattacaaaaggtttgttataaggattttttatactttcaaaagtatcatttctatatagccttatataatatggtttatcttcaaaataagattttctgatgacgcttcggacttcttcttcaccatgagggcatgcgattgttatatttggaagagttgccacaattgacatatcttctagacaatgatgtgtagttccaaaccaaccgccagaaacaccaccataacaagcaataatttttatattatgttccatgtagctaagagataattttaatgattctgcacatcgtaatgctacaaatggagcaaaggttgaaaagtatggtttgaatcctttttgagctaagccgctgcatatatcaatggaagccatttcggcgatgccgaaattaaaaaagcgtgaagggtgatgttgtttaaatatatgttttttaccgcctaaatctgcttcaactgcaatgatatcttcgtatttatatgccagtttggttaattcatgcttatatgcgtctctagatgatagcattaaattaactcctccttccatttttgggcagtagcctcattgatttttacgtaatgagatgaaaaattattttctagagaaggtattcccttacctttaatggtatttgcaataattactagagcgtgatttgctcttttttttgaaaatgattctaatatctctttataatcatgtccattaatttctagaacatcaaaaccatacgaagaaaaacgactttttaagttatgataaggagagatacttgaagttgctccatcattttgaccattgtttttatcgattatataaataaagttggcaatgttttgaccactggctacttgcaaagtttcccatattaaaccttcttgtaactcaccatcaccacctataattattgtattttctcctgactctttctgctttaatttattagacaaagacacccctatgccatatggtaaaccgtgacctaagctgccagttgagaaggttatgtttggtattagatgattagggtgaccagttaaaagcgagttgaactttccataacttaatgaaggtttttcttttaatttatttaatttatagagaatagcgtataatgctgcgcatgtatgacctttgctaagtattatttcgctattttcgaaatttatatatgaagcgtataataaatctaaaactgataaagaaccacccaagtggcaaccatattctgaatttgcaatgtcaattagctcttttcttaattctctagcatcaagttctaaactttttatgaagtgcatgaaattaatctcctatccttgaaaataagttttgcaatgaagatacaagaactttattacttttatcaaattcagataattcaatttgttcgttttcagtatgatctaaagatgaatctccagggccataagcaaccattggaacattccaagtcgtagctagagtattcatgtcacttgtaccttttttatttaaaaacttatattgagagatttcatttgttttaaaagcgaagttgaatgattttacaatatcgtttgttcttttgctagtatatcctttagtacttcttaaaatattgattttagtatttttaaattctttattaaaattaaaaatttgttccattagattttctggtgatttaatacttgttctaaagtttattgtacaagtagcaaaatctttttcattatccttgtatttttttatatctaatatcgttgataagctttgtgaatctaaatccattataaaggcctttaactgttctatataatcgagtagcatttcaataataccgacactatcttttgctgcagaatgttctcttttttttgaaatagttagttttaatttagtaagtccaaagtatcctaatgtaagagcattatatccacttggttctccaattatgacatgatttgcagcatagttatctctcacaaaaaaagctccttttgaagaagatacttcttcctcagtagcgccaataactagtaatttgcagtttttaggtactgatatgtttatcgcagcttgaacaaagttgaaataactagattttgcatcgacactgcctcttgcaaaaatattattctcagtgtttttaggagtccaataatatggaacagtatcaatatgccctaataataatacggtgtttgaaccattccctttttcaaatacgatattaccagcattatcaatatatgacttgtcaaatacacttttgtatttttctaataaatatatagataatacttcttcatctgttgatacggatggtatgtttattactttttttaaatcaatatttttagtataactattcattctccagaaggttgaatgggatttatataaactgttatatccacagatttgaatatcgcaatatccgttttttaaagcgaaatttgcagctcttactttttgtttcatacgcccttttacggaagttaagtcgctgtctaagtaaatatcttttattaacgattcagaatcattaatattttttaatatacctggagaagaagtaacaaatctcagatgagcagcttttaaagaaacggctaaatgagatgctaacatgtcagcatcaacattaatgattgattttaaactttcttcataaacaggaggagataaaataattaagtcatttattgccagcaaattccttacgtttttttcactaatactttttatggtaccgtaatgtgatcctctcaagatttgtggtttgccattctgatttatcttcaatggtttgcctacttctcctgaaattagattattaaaatccccggtatgacaataaattttatattccgaaaattctgtttttaaaatttttaaaacaccatttaaataagcgtttttgatattatatatgtcttcagagtttgaaaatctaacagagtcaccatttttatataatgtaacaaatttctcttcaatactgttctcataataataatctttaatacttcttgctccgccagacactaaaataacctttttattcttatctaatagatctttaatttctgataaaataggactatccttttgatatactgaatcactaccaactttaattacatatatgctattttccattagggccacatagctcctttctgaacagataaaccttcactttctggaatattgaagtaattattagcagcttgaatagcttgaccggctgcacctttaactaagttgtctaacatcgatacagaaagacataaatttttattaagtttgaaacttgtatatacttggtttgttcccaaagtttgttttagattaattttgtttatgttagatatataatctataaatactgattctttataagtttgaaagtatgctttctttacatctatttctgtaacatcttgtttaagattagtatatgaactaacatatattcctctaggtatatctaaactaaatgcagaaaaattaacattattagtattttgtgaaattgtatttaaaaacattactatttcaggttgatgtttgtgttcaaaagctttatgaattctaaagttattaaagcgttctgcatgagattcttttgtggtttttccacctccactggagcctgttttaacatctaaaataatattattgttttctattaagttatgtttgataagaggataaagagaataaattgaagatactgccatacaacctcctaaattaatgatttttttatctctatcaattttagtaaattcaggtatataatactgtacctttgaatttaggttttcccattccgttgctggatagtaacgatttgagagagttttatcattaagtctgtagtcaccactaacattaaatataacttctgatttattaagtaatttatttatataattaggcaatacaccagagggtaagcatgaaaatatagcatcataatcattttttaaactatctatactttgatatttcatttttctgtccaacgtgtgttggttaataattgatttaccactcatactttcggaagaaataaatgtaaccctaaagaatggatggttttgtaaaagtctgaacaattccattcctacaaatcctgtaccacctaatattgctacctctctttgttttatcatcctaatctagcatccttttcaaatggtttttttacatttattttattacttaactcgactactttattaatattactatctatttttttaaaagcttgaacataatgaagtagcttttcatattcaataggagatctcagttcacggcataatactaaagtagtatttatcatattttcggcaataggaaatttttgatttaaataatcgatgttgttgttagtgtttaaggtaaaggggtaattattcccaaatccaattttattaataaatggtaaatgatgaggtaatactctattttgccattctctagcaaatataccttcttcatttaataaagtttgaatagcttctttaattttaaaattttcaatgccgttaaattcttctaaatttacattgatatgaaatctaaacatgttgaagctgtgagttgaattaattgggataaatggtggtgaaaaaagtctagtttttttaagttcatctattagaatatttgcattacgttgtcgtattttatcataataacccaatctatctaattgactaataccgaaagctgctgcaatccaagacatttggtaatcgatttgtgtagtttctaaaaaatctttagcacgtctaaaatattcttcttttttaaagaaaacaatcccgccttcaccgccaacagggaaatttttgtctgccattaagctttgtccagccgcatcgccaatagatccacacattttattacctactttagcagaatgtgcatgagaggcatcttcaactaattttaattgatatttatcacatattttttgtatttctaataaatctgcaggtaaaccatgtacatgaacaggcataattacagaagttttaggtgtaatcttttcttcaattttttcagtatctatacaaaatgttcgaggatttacgtctacgaagatgggtatagccttagctgctacaatggcttgtgcagttgcaataaatgtaaatgctgggactataacctcatctccgggatttacaccaactgatatgagtgctagatgtaaactggaagttccacttgcagtagacaatgcatattcagctccaacatattttttgtattttttttcaaattcatcgattatacttgaaggtgtctgagaaacgctttttatcatttgaataatatcttctttagtagtattggggaaagttgtttttctagcttccttaggtaatattggagacccaccataatatgccaaattttcagtgtgcaaatcatgttttggtggatataaaacatattgagaaaaatcagtcttcatttaattcactcctttaattagacttaatttcaaacaagcagctactaatgggctcaatctatagttaaattgtatcgcgggttcaattgatgatgcatctctttcttgtgtccacatagttcttaagtcataagaaccaaaaattttgagtttttcagctttctcatatacgattttattatctgtaataataaccgcggctggtccaaaacccaaaccagtaaaatctaatataaacgtttcataatcttgtattttaggcgagattatatcattcaaattttcaaaatttaaatggagtctttctagatattctggagtattagatatttttatcccaagccattttaaaaatttagtttctttatcagttgtgttagctatatttaaagcatctccaaatccagatgaatatgatatagctgctgcgtgtaatgcacctgtataggagttgaaagtagaggcgtatttctttttagttaatttttttactttattttctaagccagggagttctttttcattcttttttatgctcattattgtccctgtatttagaactcttgataaaataaacgatagattatagtaatcgttcttcagatttgtcatttttgggctcctttgttacgaattctgatattatttcaccaatattttttttgtatattttactgctttttgcaaattcaggattgttattaacttcacaaataatatatttctgtcttgaaacatcgaaaagcaaatctacacctaaaattgcatttggcaatataatcgaaattttgttaataatatcactaatttcttctgtaatttctataggctttatttccgctcctaaatgagtattggttttccaattgttattactaactcttttaaataaacccactattttattattaatgactaatgctctaatatcatagttttcttttataatatattcttgagcaaggtatggataattttgatttttgagatctaaagaagttgatacttctttccacaaaataaaatcattatgactgtcaattttaacaatacctctaccccatgaggaattaacgggtttaattacaaatggggttttgaatttattatatagatctggaaaagttgtttctggaaaaatagcctcaaattcaggtgtaggtaaattatgattagaaaaaatattagattgtattagtttgtcagtacaaattttgatggtatcaaatgtattaatacatttgatacctaaagattcaaataactttgctctttgtaaacacatatcttgagataaattacgaattattgctaaattaaactcttgcaaataggataatttatgattgtttttttctgtcattatcactacttcaacatcatattctttaaggctatttactatttgtttttcttcttctctaacaaaagttactgacaaaataatttttagcaaattattctccccagtcttcttcgatttcaggagcaaattctagtttgaagaaattaccatcttttacaagttcatgttcttgtccgcaagaatcacattctacaatttccccctcaattaaaccttcgcctaagttgatttctgagttacatgttaagcattttaattccacaaattattcctcctaattactattttttatccaacaaaccaaataattcctaataataaattcattaattaatcgccccctttgcaatatatgtaaaattgtaagagaatatttgtagaaataatttttttatattaattttccgctttttaacaaaaaacaaaaggattgtgataatatgaatgagttattgaaaaaaataagagaagatcgttgtaaaaccaaaaaagagataagtgaagggataattagtcaaaagacatatagcaatattgaaaaaggtataacgtcactagatttaaatgatttgacaaaaatacttaaaaatttagatgtaacttttgaagaatttgcttatcaacataaagaaatgtatgaagattatttcagtaaatatattcatatgataaggaagactgtatactcttgtaatgataaatcaataaacgattctatagacacaatcttaaaggatagtaacttaaatataagaaagaaaaagattttgactagcacattaaactgtatatttaatattagtaaaggggaattaaaaagtgcgagagtacatgctaatattgtatggtcatatttaaaagaatttgatactttatatgcttatgatttgtttcttttgactcatatttttataattttcactgatgaatcgttaaatcatgttatttctagaataaaaaaagatattcgtaaatggagagattttaaaaactttcaaatagttgaaatgtctttttatttgaattatggaaagtatttagaattacaaggacagaaaatcgaagcggttaatgcatataatgaaggacttaaactttcaaagattaataacaatgcactatatgcgtcggtatgcatggtaaggttagggcgtctcactcaaaatcaaaaattagtagagcaaggtatttatatactgaaaatctttaatcctaatttatgcaaagaggtattaaaagaagagtgacggtcactcttctttatgtgcatattttattttgtctgttttgttaacaagcagcagtgtaacaaatatgagtaaggataaaatgagtataatatagaaaccgaatttatcattaatttcattaatccatcttcctaaaaatggagcaatgaaactttgcagtaacaatgaaattgacgtccatatcgtaaatgagcgaccgacatatttatctgaaacagtgttcattatagctgtattcatataaattctgattgatgaaattgagtagcctagtataaatgatcctatgaataagtaaaatgctgagtttatccaaataaatagtgctgaatttatgactaatatgaaatataacaaaaatatcaatactttagttgagattttcttcgaaagaatagctgaaattaaacctgcacataatcctccaatgccatataacatatctgaaaaaccaaattgtacagacgaaagttttaaaacattataaacatatcctggtaatgatatgttaaagatcattgtaaacaccattggtatgattgaaataactccaaaaataaatatcatcatgttgtcttttaaaaatttccatcctaataaatattcttgcaataagctatttgttgattcttcctctgaatgagttggtttatctacatgcaatctaaataacataaaaatgctgattagaaacatcattatagtcatcgctataattagagtgaatccatttattttatataatattcctgataatccacctgcaataaacatacctgtttgcaaactaatctctaatagagaatttgcatctgtatattgatctggttttaatatctgtttaactaaacttctagatgttgccatatacgtagtccaacctatcccattaacaatcgcaaatccaatcactaaataggtctcaaagcctatcattacgagtgctatgacaatgagtaaatataatattacctgaagaagataggtgattaaaataatgtttcgtctattatatttatcggctagtccacctataataggagaagctaagaaaccggataatacatttaaagctaacataatacctaatagttgggagtcgttagttttgtcgattaaataccaattagccccaactgtactaattccaactccgaatgctgaaattatttctgctaaaaagaacaatctgaagtttttaattttcaacaaatcagtcataaatatcaccttttttcaatgcaagatttatatttgcgagctcttctataaattgagagtcgtttaaaatatcgaatggtttattgccttctccgatcaaaaatctatagttagtaatattcataaactcaaatattaatttgaattggttgactaaaggttgtgctttggtatgcggattgtcgccacctatgattaaaatcaaatactttttttgtgacatgatttctttgaagttgtctatttgcggatctcgcaatgactcggtccatctatcaatgaagagttttaaagacgcactcatggagtaccaatagagtggtgttgaaaaaataataatatctgattctaaaactttgattaaaatttgttcgtaatcatcattatgaaagctggaatctttgctatgacgattatctgtaactttttcaatgttactttgatataagtttacaaagttgacatttaaattcttcaatagattctctactgcgatatttgaattgccatcttttctactacttccaaataaacaagtaatcatagtcataactcctttcgatttacctttataataatatttaatatattattattaaatcagaattcttagaatgcagaattcgataaaagtgaatcctaaaggagatactactttgaacttaaacattttaaaatcatttttagtaactagtgaaacaaagaaccttactaaagcatcagaattacttaactattcacagtcaactgtatctacacatattgaaaaattagaaaagcaattagatgttaaattattttatagaaaaaaatatggtatggaactaacggaagaaggcttagcatacgttaaatacgctaaagtgattttagatagtaatagcgaatacgagagagaaataaaaggactttacaataagaaggtaaatataagtattaacatgcaagaaagtcagtatttgtatcgctactataataagattagtgaatggttagctgaacacccatatgtaaacttgaagtttaaatccgcacattctaatttctatattaaagaagaaattgctaatttcaaatcggatattagccttatcacagacgaaaagattattaatagtaacttaactgctattcctataattgaagaacgtttaatatttgttactaacaaagagatgaaagatttcaaattaaacgatattcaaaaccatacattacttgttactgaaaaagggtgtagttacagagaacagttagaaaagattctctataaatatagcttttcaacaaaacaaatgattgaatttctaggaattgagtcattgaaaaaacacttgaaaaattcagatgggattgcgctattgccggagtttattgttgcagatgaattacaaaataaaagtttgtttcaaatagatgtcgatgtcgatattccgaatttagaaacgactttgataattaatcctgaatccagtaagcaagtactagaatcttttgtaaaagatgtttttttataaatattggtgaaaacgtgtagttatggtgaaactcaaagataatcatttattggaaaggacatacgagcaattaaaatttccaaacaaggtatacgtgtgcatctgaatttatcggcacgcttttaagtagattgaaagaccgcgcaataaaataattatttatttctatgtaacttacatctttgatactacagaagttcgatcatttcttcaatcgtctcataatcattaaatgccactaagcacgacccgattgtttcacacttttttcaaatctttaaatagcgttcattatgaatgacgccatctataacatttatttatcttataaaatagtacaattacaaagcactataacggcgactggactcaccttaaatcatcataacggcaactactaaatattgattgcaaaacacatcataaattgccatgctcaactattttgaaaagtatcaatttcacattatcaaattattgagtatctcgatttattgttatacacaaacagtatttttgttatcatagagttaataaatataataaattgaataagtaactttacaaaactagaatgattcaattcaatcacaattgtttgaaaatagaggtgagtaggtgaacgatatgttaattagtctcgtaatcccagtttttgctttgttagttattggtggtattatttgggtgattatagaaggtatagtacatatttcaaaaaagaataaagcaattgataacttttttaacaaagtcaataaagtaagtgagacatataaattcgctactacttttttatttctaatcttggctactgctggtatttctcaattttatctatattatatagtatcagcatttcttttttggcttgtcatatttacctttggtattgcaggtatcatttttttaatgccatatggcttatgtttcctaccactttatacgcaaaaaaagaaaaaacagacatttaaaaaatacatggtttacactacgattggtttgtcaatttgtctaggtttatctctagttttggtttacactacgaaaatttatatggacgaaggtggcgtaagatactattacggtagttttgtaatgaaacaagcgggcggttatgcttatttagctttagcagtactttcaacgttgttaattgttgcgaaaaaagctacaaataaaaataaagaaatcgaaaccgtcgacaatacaaatataacggaaagataattaagggagtgctcattcaggagtgctcttttttgatgttcaaatttagttggaaatgaagaagcggaaacatttgtgagtggaaaataaaattcaagctgacatcctatcgaacatatctgtaaagcaaaaaattaacgccacaatcttcaacgtaattaaaaacagacattttagtaatatgctttttcaaacactaatctaataatacgtccatctacaaaatatttctacgcactaaaaaaggcggactaaatcgtccgcctcaatgcacactaccgcatgtggtttttatagagtttctttatagaatgattcaagttttggtaacacttgatttacgtattctggaatatcatataaatctacgtgtgatgcaccttcaattttatatagttcgttgttgtcgcctgctgctttttcaacagcatcaacgctatattcaatcgtgtctgcttctgtacctgcgattgctaagaatggttgtgtcaacaattcatcaatatatgtgaaaggcgcaaatgttaatacttctgaaaaacttcttaataatagtttatttggtgcgtttttatgttgaccacgttcagttaaataataatcatgcccttgtaccattgttgaattttcaggcatagaatcatcaatttcttcaggcacatagccagtgataccataatctgcaccatttgcttcagctgtacgttgatctgcaacttgtgtcataaatgccaattggtcattaattgatactacatcgccaggacctttacggaataaagcaccaatatctaccatacttacagtagctaatgttttaatacgacgttctgttcttgctgcacttactgtatatccaccaccggcacaaacgccaagcgcaccaattctgtcattatccacaaagtctaatgttgtaagataatcaactgaagctctaacgtcttctgttctcgcaaatggatcttctaaatatctaggagaaccttcactttcaccttgatgtgatgcatcatatacaaccgtaacgtagccgaattccgcaagtttctctgcatacatacctgcagtttgttctttaacaccgccacctgggtgacaaactgtaattgctggatattttttgctttcatcaaattgttctggtgtatataaattcgctgctaataaatttgttttacttttaaaattaactgattgtttcatagattaaatgcctccatctttttatataagtcattcatttgttgtagatatttattactcttgtgtgtataatgccatactagagtatttaaatgtacaattcaattaacaaggaagcacatatgtgttttaatacacagttttataaaaatgggttttaaaaggaaggagtattattatgaatgttggggatttacgtgttgttaaaacgagagctagtattaaaaaggcatttatgaccttactttttgaaaaagattttgatactatttcgattaaagaaattactgaatttgcgcaaattgggagaaaaacattttatctacattatattgataaatatgatttactagatcaaatagtatcggaaaaattgatagaacttgagcaaatttctgaagccaaaaagagtctcggtatccaagaaggtacacagttatggtttgagtttttcgaaaataatagaacgttttttatgaaaatttttaatatcaacaacgcttcaaattataagaaaaaactgcttcattttattgaagaagaatttaagaaaaaagttccgacacgtgttgctactgaaaaaggcttagactacgacttatatattaattttattagtaacggtattatcggactacttgatatctatctaaacagcagtgaaaatacagaagaacaagaaaaaataacattgcaggtgtcgcgcctgctatctttgtacgatttaatttaaaactaagctatctatattgaaatataattgcgtgtagcagatatagtatgtcacttcttgagagaattttattataatagttttatgaattgatattgtagtgacaagagctaagaaagaattttatgtaattggcgacatgcaaagaatacagatgaaaccattttatgagacgatttttaaagaaagaaatgtagaataacatacaaaaaagtatatagaggaagttatgttcatgcaaaatagaaatgattttatagaaaaactattagacagagctcaaattgaagaaggcatgcgtgtactggatataggttgtgcgactggtgaggtcactcaattaattgcaaaacgtgtgggggcgaatggtgaagtcgtcggtgttgatgtgaatgaatcattacttaaaattgcaaatgaaaccaatcaatataacaatgtatcatatcaatcttctgatatatatcaattgccagaaactatggggcattttgatgcgattgttggtagaagagtattaatgtacttaccggatgctgaaaagtgtttacaaattttgaaatcaattttaaaacctgagggtatattatgttttcaagaaagtgatgctattaatgcaggtgttggtgcagatgtactatctttacatcaatcagcaattcaatggatttgggaaacagtgaagcaagaaggtggcaatattcatattggtcaaaatttatataatttgtttaataataatggaatgcatgttgtagattattttgcagaggcagtgattcaaacgtcaatggataatgatttagcatggcttgtaggtgtaatgctacaaagaatgaaagcacatggtgtcattaatgatgatttttcactagatgagtttaaatcaaaccttgaacacgaagcaataaacaatcagtgcgcatttatacgtgacatggcgtttggtattatcggaaaagcctagtttaaaaaacgctgaaagcatcatattatcatcgccattgttttaatttgtaaagttactaatggattttgaaatgacagcatttctttagactaatcaagtgatacttaattatcgagcaatttatacattttaaaaggagcaaaattgaataatgaagaaatttaacaactggatattaaatgcaataagtggatctcaaacagacaagaatggaacaactaaagaattaaaaggggcaaaatttatcattttatatgcatattcaatgctcgttttgcttgcgttagtaatttctaacatattcattcacattttggagcctaaactatcaatcaccactcaaatcatcatcgttttaattttaattgaagcaataattggactgcgtttcttgaaagagtacgatgttaagcgtgacaaagataaagaaaataagagaaatagtaaggatttcgttaaactaaaatcaattttactagcaattttatttacatcattggcgctgacagcaggcactgtagctgatatatacggtttcactgacttaggaaatactagaagtgatttaatcgtttggagcataggtggtattatatttggcctcgtatgttacacaatggaagataaaagataacgataaggagctggcgattataaagctagctccttttttaacttatatatgtaaagaactatcctaagggtttttaatcatatgtcaataattcctataatacattattaaaacatcaattaaataagttttaaaattttacaaatatttttatttaaaaaagatgtataattaatgtattaaatatagaaagaagttgatattatgaaaaagtgtattaagactttgtttttaagtatcattttagtagttatgagtggtttatatcattcagcacatgcgtcagattcgttgagtaaaagtccagaaaattggatgagtaaacttgatgaaagcaaacatttaactgagattaatatgccaggctcacatgatagtggctcattcactttaactgatccggtaaaatcagtttgggcaaagactcaagataaagattaccttacccaaatgaagtcaggagtcaggttttttgatattagaggtagagcaagtgctgataatatgatttcagttcatcacggcatggtttatctgcatcatgaactagggaaatttttagatgatgctaaatattacttgagtgcttatccaaacgaaacaattgtgatgtctatgaaaaaggactacgatagcgattctaaagttacgaagacatttgaagaaatttttagagaatattattataataacccgcaatatcagaatcttttttacacaggaagtaatgcgaatcctactttaaaagaaacgaaaggtaaaattgtcctattcaatagaatggggggtacatacataaagagtggttatggtgctgacacgtcaggtattcaatgggcagacaatgcgacatttgaaacgaaaattaataatggtagcttaaatttaaaagtacaagatgagtataaagattactatgataaaaaagttgaagctgttaaaaatttattggctaaagctaaaatggatagtaacaaagacaatgtatatgtgaatttcttgagtgtagcgtctggaggcagcgcatttaatagtacttataactatgcatcacatataaatcctgaaattgcaaaaacgattaaagtaaatgggaaagctagaacgggttgggtgattgttgactatgcaggatatccgtggcctggatatgatgatatcgtaagcgaaattatagatagtaataaataaggattcaataatgatattaagacgagtatgaaaatagttagattctaattattttcactactcgtttttattttgaaaataagtaataattcaacaatattataaattgaacagattgtttatggaatttttgataatattaaagtgaaaaagtgttataaattgataaatatatgtaattcgcaaaagtaaatcattttaaaaagaagagagttgtaagatgatgaaacgattaaacaaattagtgctaagtattagttttctgtatttaatcattagtttcactgctggttgtggcatgggtaaagaagcggaaattaagaaaagttttgaaaagacattgagtatgtatccaattaaaaatctagaagatttatacgataaagaaggttatcgtgatgatcagtttgataaaaaggataaagggacgtggattattcgttctgaaatggcaattcagaaaaagggagaagccttaaatataaaaggtatggttttgaagttaaatagaaatacaagaagtgcaaaaggattttactatgttaatgcgataaagaaggatgaaaatggcagacctctggataatcaaatagaatatcccgttaaaatggtagacaataaaatcattccaactaaaggtatcaaagacgaaaacataaaaaagaaatcgagaattttaagttcttcgcgcaatatggcagctttaaagatttgtcgaagtacaaagacggcgatatatcatacaatccagaggtgccgagttattcagcaaaatatcaattaactaatgatgactataatgtaaaacaattacgaaaaagatataatataccaacgaataaagcaccaaagttattgttgaaaggtacaggtaatttaaaaggctcatcagttggatataaagatattgaatttacgtttgtagagaaaaaaggagaaaatatttactttagtgatagcctacatcttgaaccgagtgaggataaataatcatccacgcacacgattcaatatgaaattcaaatatgttgctgtaaaataatgtaaaataaacgtattcatattactgaattgagggatagtatgcaacgtgattatttaattcgagtagaaactgagagtatgtcagatttcaaaaggctcaatggtttaatgattggttttgttattaaaggtgaggcacatatttatgatgaaaataatatgacgcaatgcaacagtggcgacattttcatcattaaccaccgcgacttgtatcgatttcaacttcaacaagatggcatcatatgttatatccaattccaaatgaaatatttagcagacaagtttgatgatgtgcattgtctatattttcacttaacagatgcgaccacaacaaaaaatatacatcaactgagaaatataatggcaagactggtttcaacacatattcgacataatgagttgtctaaattgactgagcaacaacttgtgattcagttgcttatgcatatgattcattatgtcccgcgtacatatcattcgaaccaaagtatcttaaatgatgataaagtgaatcaagtatgcgactatatcgagttacattttcatgaagacttaagcctttcggaattaagcgaatatgttgggtggtcagagagccatctgtctaaaaagtttgcagaatcgctaggtgtaggattccagcatttcttaaatacgacgcgaattgagcatgcgaaactcgatttgacatacacagatgaaacgattactgatattgcattgcaaaatggcttttcaagtgcagcgagctttgcgagaacatttaaacactttacgcatcaaacgcctaaacaatatcgaggtgatcgtccagcaatcactgaaaatcaacaatcggcacaacataattatcacgaccgtgaattgatattacttttaaatgactacattgaagaaatgaatcattttattgaagatattgaaaagatgaactataaagagattgcctttcaaccaaccaatcaccaactaaatcaatttaatcatattattcaagtaggctatttgaggaatttgctcaatacacagtatcaatcacagttgcttacatgtcatcatgattttcaagtcaatgaagtattagcatatgatgtgatgccatatatcatgaaaaagctcaatgcgccattcacgtatgatgcagaaatttcgaatatattttatgatatcgatttgtgtttagactttttattagataataactttagtttgaccatgcatttggatcattatgactcacgtgattatatcgatgcatttaaaatttttatccatcacgttgccctgcatgtcagtcatagaaaagatttgaagttcaacttgtatgtgacgacattgcacaattctttgattgaaatgattgattattttaaagcattattccctaatggtggcttgtacatccacttagatcaagctacggaaagacagctaccattgttgaaacgacttgagccacacatcgaccattttgtatttgatgctaattcaaatgatgctgttgattttaataaaatgaatgatgatgaatttaaaaccgcaagtcaaatgattattaataaaacgaattaccttatcgacttaatgcatcgtcatcacctaaagcgtccactcattttactcaattggaatacattgacgggtgatacatttattacaaacggcgaatattttagaggtggtatcatcattgagcaattattaaagttaagctcaaaggtagaaggcatagggtattggttgaattatgatttgcacgtcagtcattgtagaaatgaacgggattatatgaattctattgaactgtttcatcaatataatggaaaacgtccggtctatttcacggcattgctatttaataaattaacaagcaatattttatattctgatgatacatgtattgtcacgggaactgattcaaattttcaaatattgttatatgatgcaaagcattttaatccgtacttagcgttggacaatcaaatgaatatgcgtgcaacggaaatgattcatttgaacattaatgccctggaagacggtatgtataagattaaacattttaccttagataaagaaaatggtgcattatttaatctttggcgcaaacatcatacgatacatggtatggacaaggactctatagattacgttaatcgaatgagttttccaaaattagaagtgtacgatatagatgtgacggatacgctgacattaaacattaaaatgattacgaatgggattcacttaattgaagtaaaacgttacccaagttcataaaatgatcacaaatcacaaattttgatacacataatttgtgattttttgtattcaaagttaaaattgcaaaaaattaatggttaacatctctgttgttggcaatataaataatgattaatcatttatgatgtaactaaggagatgaaggatatgaatcaacaattaattgaaactttaaaatcaaaagaagacaaaatgattgagatcagacgttatttacatcagcatccagaattatcttttcatgaggatgaaacggcgaaatacatcgctgaattttacaaaggtaaagatgtagaagtagaaacgaatgtcggaccacgtgggattaaagtaacgattgattcagggaaacctggtaaaacattagcaatccgtgcagactttgatgcattacccattaccgaagatacaggcctatcttttgcatcacaaaataaaggtgttatgcacgcatgtggtcacgatgcacatacagcatacatgcttgtattagcagagacgcttgctgaaatgaaagatagttttacaggaaaagtcgttgtgatacatcaaccagctgaagaagtaccaccaggtggtgctaaagcaatgattgaaaatggtgtattagacggtgttgatcatgtattaggtgtacacgtcatgagcacaatgaaaacaggtaatatgtattacagacctggatatgttcaaacaggacgcgcattcttcaaattgaaagttcaaggtaaaggtggtcatggttcatcaccacatatggccaatgatgccattgttgcaggtagctacttcgtcacagctttacaaacagttgtatctagacgactaagtccatttgaaaccggtgttgtcacaatcggttcatttgacggtaaaggtcaattcaatgtcattaaagatgttgttgaaattgaaggtgatgtacgtggattaacagatgctacaaaagcaacaattgaaaaagaaattaaacgtttatcaaaaggattagaagcattgtatggtgtaacttgcacattagaatataacgatgattatcctgcattatataatgatccagagtttactgagtacgtggctaagacgctaaaagaagcagaccttgaatttggtgtcgaaatatgtgaaccacaaccaccttcagaagactttgcatactatgctaaggaacgaccaagtgcctttatttatacaggtgcagctgtggaaaatggtgaaatttacccacatcatcatcctaaatttaacatttcagaaaaatcattacttatttcggcagaagctgtagggacagttgttttagattaccttaaaggagataactaacatgaatgaaacgtatcgcgggggcaacaagttaatcttaggtattgtattaggtgttattacattttggttgtttgcacaatcacttgtaaatgttgtaccaaatttacaacaaagttttggtgcagacatgggaacaattagtattgcggtaagtctaaccgcactattttcaggcatgtttgttgttggagcaggcggcctagcagataaaattggacgcgtgaaaatgacgaatatcggcttattattaagtattattggttcagcattaattattattacaaatttaccagcattgttaatcttaggtcgtattatacaaggcgtatcagcagcgtgtattatgccttccacattggccattatgaaaacttattatgagggagctgaacgtcagcgtgccttaagctactggtctatcggttcttggggtggaagtggtatctgttcactcttcggtggtgcagttgcgacaactatgggttggagatggattttcatcttctcaattatcgttgccgtactttcaatgttactcatcaaagggacgcctgaaacgaaatcagaagttaccaatacacataaatttgacgttgcaggtctaattgttctagtagttatgttgctaagtttaaacgttgtcattactaaaggtgcagcacttggttatacatcattatggttctttggtttgattgcggtcgttgttgtagcattctttattttcttaaatgttgagaaaaaagtagataatccgcttattgactttaaattatttgaaaataaaccatatacaggtgcaacgatttcgaacttcttattaaacggtgttgcaggtacattaattgtagcgaatacattcgtgcaacaaggtttaggttatacagcattgcaggcaggatacttatcaatcacttatttaatcatggtgttattgatgattagagttggtgaaaaattattacaaaaaatgggttctaagcgaccaatgttattaggtacattcattgtgatcattggtattgcacttatttcattagtattcttaccaggcatattttatgttatcagttgtgtcgtaggatatttatgtttcggactaggcttaggtatttatgcaacaccttctacagatacagctatttcaaatgcaccgttagataaagttggcgttgcttcaggtatttataaaatggcttcatcacttggtggtgcattcggtgtcgcaattagtggtgcagtatatgccggtgcagttgctgcaacgagcattcatacaggtgcgatgattgcactttgggttaacgtattaatgggaatcatggcatttatcgcaattttattcgcgattcctaatgatgataaacgtgtcaaagatgcggaataataacgatgacacgcccagtgttttgataatgatataaatgaaagtaaagcaaattaaatgaggaaatgtatagagcagtgcatatagataaatctatgattggattgacactaatataaatataaatgaaaaaccatccacttaaacttttgataagttaggtggatggttatttattgcgttgttctaaaaatttggacacttttatggaaagaactatatataatgtgaaggttatggcaattcgcttcaatgaaggcgacgtgtaaaagtgtatattaaatgattcgaggtcagactccgagaacagtgtccgtcatgcttaccgcatactaatgaagcattattatatcagcgtttatagctgatttaagataataaagtttgctaaacagaaaagccaacccatgaatgttggattggctttgtataagcatattaagttctaattttaaaaaatatgaatataaataagacattaaaaattaaatttcagttgttgcaatttcttcatctgtaggtacatcatcgttaagaccaacaagtgcttcagaaacatttcgtgaatgataaccgatacgttcaagaacaccaatcatatcgatatatagtaatccaccttttgttgtacattcaccacgattaaggcgtttaatatgacctttgcgtagtttatgttcaatattaaatgattctctactacgttctacaatttcatcttttttcgttttgtcataaacatctaacatgtcgatggctttatcaaatgactcagcaacatggttgaataatttatccataccgcgttgtgcatcttctgtaatgcgaatatcttcatcatgttggcgttttaattgagcgacatactcttctgttagctctgctacttttaaaatagagcgattgacatcaaacataactgctaaacgctcaacgtctgctttcgtaatggcttttgtagaaattctaactaaataatttcgaatactatcattgattgtttcaacagcttgatgcttttgttcaagctttttgatcaattttttatcgtcttttgtaatttcgcgaatgtcttcaaacattgataagacaatctgacccacattttgtaattctttttgagtttcttgtaatgcaacaccaggtgcgtgataaacaagatctttgtttaagtgctgaggtttatagtcatcagcaatatctttacctgggacaagctttgtaactatccatgctaaacctgctacaaatggtaattgaatcaaagtatttgttatgttgaagataccatgtgatactgcaatcgtcatcgctggttttaagtgccatacatcttgtaacaaactaatcaaatgaatcacaactggcaagaaaattgtgaagataattaccccgattaagttaaagatgacgtgtacaagcgccgcacgttttgcagcgattgagccggctaaactagctaagatagctgtaatcgttgtaccaatattatcgcctagtaacacagggattgctgcgtttaagctaattaaatcttgttgataaaattcttgtaaaataccaatcgtcgcacttgaactttgaactagtgctgttaaccctgcgccgacaatgacagcaagtattggatttgtagacatatcaagcattaattgcttaaatccatctaatgatgctaaaggtttaacggcatcgcccataaattctagaccgaagaatagagaaccgaaaccgaatagtatgcggccaatgttattgattttagagcgtttaaagaaaaagattaaaaatgcacctaatgctaaaattggcattgcatattcgcctaaatctataccgataataaatgcagttaccgttgttccgatattagcacccattatcactccaatggcttgtttcaatgtcataaatccagctgttaccagtccgattgtgataactgtcgtacctgaactactttgtattaaaatagttacaacgatacctgcaataacacctaatactggatttgatgtaaatttgtttaaaatatctcgtagcctgtctcctgctgatgcttgaagcccgtctcccatgatttttaagccgtaaaggaaaatacctaaaccacctaaaaaggagaaaatgacttctgtaaccgacatttccattatttcacctcaaataagctttatatttagattatcgcttataattgtaaatttaatgttaagattaggtaaaattatttaacaatatatgttatttgtatatgacttgtaaaatatcgtcacttattatgtaaattttcagtgtgaaatggcaggtttgcaatcacttgtttaacaaaatgatgcaatcaatcatgtaattatgtgtcatcaaaaaaatcatgtgagtgggataacgaaataaagtttgtgaacatatcacttctatcccactccatgatttgaaatcaccaaataaaaatctattaatggttttcgttataacaatttgtgttcttttaataatgactcaatgtacgtaccttttatctttttaaggaatcctgctaatgcgagtttttgtattttcgaatctttagtaatctcgcgcaaatcttgatggtcattcagttcgtatatggcatccattaagacgcgaagatcaaatgtactattgatgacctctggaataccacgatctatatttagtaattgataaacagcttccatggcagtacgaaccgaatattctgttgtaaatacagtatctcgctctgtttctgcaaagttaccaataaatgctaaattttgtgattgatgcgggacgactaaaggtctgtcgccgatagcacgcgtcatgaaataagaggtaatatatggcatataaacaggaatcgtattagatgcatgttttgctaagtcttcaattttgtcagttggtacacctaagtgatacagccattcttgacatatttcattaccactacattctgtgattggctttttaatataatcgccgtttacatctgaatataaggcataaatccatgtagatatttcatttttaggttggtctttaaactgttgctgacgattgattgtaaaactgatttgccatgcagaatcattgattgtaataattccgccagtaaccgttttgcctgcaagagggtcacgtttacaaatgctttctattgtatcgataatatctttattgtttgttgtcgatgttgcagaaacaaaccaactcttttgaggaatattttggcaaaacttatcaggattaccaaattcaggactttgtcgcgctaaatttttccatagtgtccaactaccacctaattcgtcagttggtggtgctggtgtatcattatcaccatacgtagagctttccgtaatactaccgtttgtcacaaagacaagatcatctacagtcagtttaattgactctgctttgccatgtcggtgaattaatatttctcgggcaattttttgacttgtcgtaacatctactttaatatcttctacttttacatcgtattcaaattgaaccccatgcgattttaaatattcaaccataggtaatactaaagattcatattgattatatttagtgaattttaaagctgaaaagtctgcgagaccaccaatatgatgaacgaatcgcattagatagcgacgcatttccatagcagaatgccacggttcaaatgcaaacatcgttttccagtaaatccaaaagtttgaattaaagaagtcatcggaaaatacatctgttattttgacatcatctaaatcttcttcattcgttaagcataaatctaaaatttctttaattgccgttttagtcaaagtgaagtctccatctgtgactaaacgttgaccctgtttctcaataacacgacaacgagaatagttagggtcttctttgtttaaccaatagaattcatctaatactgacgcatgatcaatttcaagcgaagggatagatctgaataaatcccacaaacattcaaagtggttctccatttcacgaccacctcggacaacatagccttttaaaggcatattttcaccatcaagactgccgcccgctttgggtaactcttctaaaatatgaatcttagaaccttccatttgaccatccctaattaagaaacaagctgccgcaagtgaagctaacccagacccgattaagtaagcagatttgttttctacattttcaggttttttagggcgcgcaaatgcttcataatttccataactgtaatacatatccaccaagtcctttcgtattagaatacactcagactatacccctttgtgaattgcaaatattagtatttatattggtgaatttgacgaaattagatcatttttatatttttgatttttaaaattttatcactcgaatgtttttggattctgaggtgcgggacttggaataattatgtattttgaaagaagttacttaaactaacgcctagtagagtgataagtccgcctataatagcaagggttgttggtagttcgtctaataatagataagataataataaagaaacgataggtgttaaataaagagacattgttgcatcagagacaccaactgacttcacgatataagcaagcaaaacgtatggaattatagtagggaatatagctaaataaagtaccgatactattgatgtaaaagtggcgccgtgtatatcgttgatgatttcaggaataaaaataagcataaatggtgagcttgccattattgtatatagtgtaaaagcgatgaagccgtatttttctatgtattttttctggaaagtaaaatacaaactttcactaaaagatgcaagtaaaataataaaaacacctaatacattaatagttgtgtaatcatctttacttattgaaataatggatattcctataaatgcgacgagtgaacttaaccaattccattttgaaaaatgctcttttaaaaatatataagctaaagcactagaaaaaataggcgttgtagagactagaattccagatatacctgcactaatcaaagtttcaccaaaatttaaagctgtgtgatatatcacaaatccacaaaatcctaaaataaaaataacagggatatctcttagttctggggtaggtaatttctttataattacgaacggcaagagaattattgttgctaaaattaaacgaaatgccgacaatgattctgcactaaaatcatttaacgcaatctttatcattggaaatgcagatccccacaatatgatagtaaataaatatgatagaaaagtagtgtctcgaagtttattcattaatatcatcactcctttaattaagtgtttctatattaaaaaatatgatttaaaatgagtacaaccaattttgattggatttacctatccaatttataaaaaggggggagaagatgacgaaatataaagatattgctagtgacatcagagataaaataatcgcaggggattggttttatggaatgaagataccttcacagaggcagttggcgatacaatacaacgtaaatagagtgacgattattaaaagtattgagttattagaggctgaaggatttatctatactaaggtggggagtggaacatatgttaatgactatttgaacgaagcacatattacaaataaatggtctgaaatgatgttatggtcctctcgacaaagaagtcagtatacggtgcaattaattaataaaattgagacagatgacacgtatatacatataagtaaaggtgaattgggtcaaccattaatgccacatattcaattgaaaaaagccatgtctaatacagccagtcatattgaagacttatcttttggttataataacggctatggttatatcaagttaagagatatcatcgttgaacgaatgtcaaagcaaggtataaatgtaggtagagaaaatgtaatgatcacttcaggcgctttacatgccattcaacttttatctattgggtttttaggtcaagatgccataataatttcaaatacaccatcatatattcactctaccaatgtttttgagcaattgaattttagacatattgatgttccttataatcaaattaatgaaattaataccatcattgatagatttattaattttaaaaataaagcgatttacatagaacctaggtttaataacccgacaggttgttctttaacgaatgagcaaaagcaaaatataattacttatagcgaaagacataatatacctatcattgaagatgatatctttagagatattttctttagcaatccaactcctgctatcaaaacttatgataaattgggaaaagttatacatataagcagtttttcaaaaacgattgcaccagcaataagaataggttggattgttgcttctgaaaaaataatagagcaattggcagatgtaagaatgcaaattgactatggatccagtattttgtcacaaatggttgtatatgagatgttgaaaaataagtcttatgataaacacttagtaaagttaaggtatgttttaaaagataaacgagactttatgttaaacatcctcaataatttatttaaggatatagcacattgggaagttccaagtggaggttattttgtatggttagtctttaaaatagatatagatattaaatatttattctacgaattgttaagtaaagaaaaaatactaatcaatccgggttacatttatggcagtaaagaaaagagtataaggctatcttttgcctttgaatcaaatgaaaatattaagcatgcgctctataaaatttatacatatgtgaaaaaggtttaattaaaacaataattcgaatcattatgtggcatgttaaacagctaaatataagctatgcacatttaacaagcggatactcctgacgcaattatagtatcattacatattgtttaatcgtttggggtaatgtaattaaaaggtaaaataggcagagtgttatacataaaatgtaaagaaagaggggatagaatgtctaaaatcaggtcttttacaatattaagtctacttatttacttagctatgatgtgctatacagtagtgacctattcaaaattaccaaccaaagtacctattcactataatttagcagggaatgctgataactttgctgataaatgggtgctgcttttgattaatagcgcatttatagtgatttggcttatatttttcattgcaggtagatactatgaacgatttgccaaatggtcacattataatcatacaccacgtgaaattcgagcgattaaattatttttaagtacgttaaatttagagattatgagctatatgtctatcttcacagtattagaaatttggcaaatacaacaccatcatcaattcaatttactatggtttaatatgatatttatcattatcattggtttgacgcttgtcatattttgtttacttccgacaattcataaaatgagagattctcaataaaaatataaactgtcatgatgcagttttgaagcggattcgtgagattattataaataatatctagtatttataattaaaatgatatattatttattatagttaaatattgtgtatattttgtgaactttttgtaaaaattcgattgcctgtcacatataggagtgttacattttaaatatgtgatcatcgcaaaatataagttgaaataggttgtagattaatcaggatgataaatattttatataaagagagggagtcattatgacactacttactgtaaatccattcgataatgttggattatcagccttagttgcagcagtacctattattttatttttattatgcttaaccgtttttaaaatgaaaggcatttatgcagcattgacaactttggttgttacattgattgtggctttatttgtatttgaattaccagcgcgtgtatcagcaggtgcgattacagaaggcgttgttgccggtattttcccaataggatatatcgttttaatggcagtttggttatataaagtttctattaaaacaggacaattttctattattcaagatagtattgcaagtatttcagaggaccaaagaatccaactattattaattggattttgtttcaacgcatttttagaaggtgcagcaggatttggtgtgccaattgcgatttgtgcagtattattaattcaacttggatttgaaccattaaaagcagcgatgttatgtttaattgctaatggtgcggcgggtgcctttggtgcaattggtttaccagttagtattattgatacgtttaacttaagtggaggcgttacaacattagatgttgcgagatactcagcattaacacttccaattttaaactttattattccatttgttttagtattcattgtagatggtatgaaaggtattaaagaaattttacctgtcattttaacagtgagtggtacatatactggattacaattattattaacaatattccatggtccagaactagcagacattattccatcactagcaacaatggtggtgttagcatttgtttgtcgtaaatttaaaccgaaaaacattttcagattggaagcgtctgaacataaaattcaaaaacgaacgcctaaagaaattgtctttgcttggagtccgttcgtcattttaactgcctttgtattagtatggagtgcaccattcttcaaaaaattattccaacctggaggtgcgcttgaaagtttagtattaaaaatgccaattccgaatactgtgagtgatttatcgcctaaaggaattgcgttgcgtctcgatttaattggtgcaactgggacagcgattttattaacagtagttattacaattttaattacgaagttaaaatggaaaagtgcaggtgctttattggtcgaagcaattaaagaattatggttaccgatccttacaatttcagctatcctagctattgctaaagttatgacatacggtggtttgactgtagcaattggacaaggtattgctaaagcgggagcaattttcccattattctctccagtattaggttggattggtgtgtttatgactggttcagttgtaaataacaatactttattcgcacctattcaagcgacagtggcacaacaaatttcaacaagcggttcattacttgtggcagctaacactgcaggtggtgtagcagcgaaacttatttcaccacaatcaattgccattgcgactgcagctgttaaaaaagttggtgaagaatctgcattattaaaaatgacgttaaaatacagtattatatttgttgcctttatttgtgtttggacgtttatactaacgttaatattctaaatataaataatgttgtcacttggattcaaatgacattttaaatctaattattcatgaatcgaactagtacgaaatgcattgagcattttgtctagttcgattttttaatgtctaaaaatgtcgtatatgtaattagagtagaaagtgttgaggcgttttagaagttttttagaaaagtaagtaaaataaaaaatgcactgagcaacaaaagatgttactcgtgcatttagatgattcttatcatttcaaataagaatgttgttaatcatatataggttaaaattggtttggataaaatgatatctatcgttgtgtattgtttgtttttatagttcgcgacgacgtccagctaataatgctgcacctaacgctaatgataatccaccaaatacagttgtaccgatgaatggattttcttcaccagtttctggtaatgcttgagctttgttagcatctgcatgatttgctggttgcttcttatcaacaacaagttcttgaccaggtttgatcatgtttttatcagctaatttgttatctgaagcaattttgtcagcagtagtgccgtttgcttttgcaatgtcatttactgtatcaccaggtttaacgacatgtactccgttgccgtcttctttaccaggttttttgttgtcttctttaccaggtttgttgccgtcttctttaccaggttttttgttgtcttctttaccaggcttgttgccgtcttctttaccaggtttgttgttgtcttctttaccaggtttgttgttgtcttctttaccaggtttgttgccgtcttctttgccaggttttttgttgtcttctttaccaggtttgttgccgtcttcctcttttggtgcttgagcatcgtttagctttttagcttctgctaaaatttctttgctcactgaaggatcgtctttaaggctttggatgaagccgttacgttgttcttcagttaagttaggtaaatgtaaaatttcatagaaagcattttgttgttctttgttgaatttgttgtcagcttttggtgcttgtgcatcatttagctttttagcttctgctaaaaggttagcgctttggcttgggtcatcttttaagctttggatgaaaccattgcgttgttcttcgtttaagttaggtaaatgtaagatttcatagaaagcattttgttgttctttgttgaatttgttatcagctttcggtgcttgagattcatttaactttttagcttctgctaaaaggttagcactttgacttgggtcatcttttaagctttggatgaaaccattgcgttgttcttcgttcaagttaggcatgttcaagatttcatagaaagcattttgttgatctttgttgaaattgttgtcagctttcggtgcttgagattcgtttaattttttagcttcacctaaaacgttagtgctttggcttggatcgtctttaagactttgaatgaaaccattgcgttgcgcttcgtttaagttaggcatgttcaaaatttcatagaaggcgctttgttgatctttgttgaagttattttgttgcgcttcagcttttggagcttgagagtcattaagttttttagcttcacctaaaacgttagcactttggcttggatcatctttaaggctttggataaaaccattgcgttgatcagcatttaagttaggcatattcaagacttgataaaaagcattttgttgagcttcatcgtgttgcgcagcatttgcagcaggtgttacgccaccagatataagtaatgtacctaaagttacagatgcaatacctacacctagtttacgaattgaataaatatttttctttttcaaattaataccccctgtatgtatttgtaaagtcatcaaaatataacgaattatgtattgcaatactaaaatctatatttataattaaatttaaaggtaagttttacaacttataaaataaaaattttgttcaaagatttattcaggaagtaaaaggcttaaaaccgcaaaatcacgctatttcgattaataaaaacagataaaatatagagatattttttataatgaaagcggtttaatacatatgagttaaaaaatatttttaagaataaagtggggctttgaatgtgcttaggtttaatttcggaaatggttttaagagatatagaaaatagaaagttgttcataatgtgctgaggttttattaaaaaatagaaaacacaagtgcactttagaatacagcacacttgcgtaatagagatattattcaaaaacaagatgtaaatgatctttatctgccaataattgattcacttgagctaataattgttcagcatggtcttgctgcgcgtcatccatatgaattaaaatttttctttcatcttcagttgagcgttcttttattagatagccttgcttttttaaattattgagagctctaacagtttgagggtatttatggtggattgtttcaattaaatctttaagaagaacgatgtttttattttgagaagtgataatagctagaattgtgaattctacaaaacttaatgttagatgctttttgataatattcttgaaatacattgtatacatcatcaagtttagaaattctttactatcttttggtatcatctgtgattcactttgatctgcaaggttaaattgtttaatgatttgatcaaacaatgtaacacgttctgcaattttctctcgttgttcttcagatattgaaatgtaagtattacgctcatcaattttacttcgaactttactaatatatgaatgtttcacaagtacttttatatgctgtactaaatccgattgtttataacataaatctgaaacaatcttcttaaatggaagtgtgttttcttgctgatgaaataaataagtcagtaatataaattcttttatactcatatcgacttcaggcttgacttttttcttaaaacgaaacatatatgcttcaatgattataaaatctctaattttgtcatggttattatatttcattgttttatctccttgtatatgcactttattttaatataacacaatataataagaaaaataatccataatttacaattaaaaataatatgatatttttattaaaatttgtgtttttgaataaatgacattatcaaacactatatttaaataagaaatagttatcgatatttgaaaaatcgaagaatattgattgatattatagaatatgagtcggtgttatttgtatataaagtattaatatgtaattgagaaagtcgacgcttgttaacaataacgacaactatatgtataaaaaaacctcgcaacggttagttagcttaaacattttgctaacgttgttgtgaggtcattttgttttgataatatcgttataactttttcacggttaataataagtatatgaagaatggggcgccaaacgcagcaataaatacacctgctggcacttctttaggcaagaataaggtacgcccaattaagtctgcaataacaattgatatggcaccaatcattgctgacattagtaactttttagcataacttccgcggacgattgttttcgcgatatgtggtgcgattaaaccgacaaacccaatgttacctactaaactgattgccatagatacgagtatagtagaagtgattaattggattagtttcatacgttgtacatgtaagcctaagccaatcgctacagggtcatcaagtatagatattttcatttttggtataacaagaaataacaacggcacaacagctaaaataaccatacccaaaatgattgtatctttaaacgtagcaccgtaaagacttccgactaaccaagtataagctttggctgcagatagttgctttgttgtaataagtagcccttgtacaagtgcaataaacaatgtttgcatcgaaataccgatgattatgagtgttgtcgggcgtatttgtcctttcgtttgaaacactaatagtatcatcattgcaactgcgccacctaatacagcaaatagtggaagtaaatgtatcgttaaatggctgaaaaatgcaataaagacaacagcacttaagctagcaccacctgtgataccgataatatctggtgaggcaattggatttttcaatacattttgtaacattaaaccactcatccctagtgcagcaccagctaatatcgcaagtgtaatgcgaggtaagcgtaacacttctaaagtgaattgatctacactgtcatttggatttataaagtacatcaatacgcgttgtaatggtataaagcttgaaccaaccatcatacttaccactgaaatgatggctaaaaagattaacgcgaagatgagatggtaattgtcttttttattaatcttttcggtcataagcgttgacgtcctttcttcataagatagattaagacaatagcgccaatgacagcggtaacgacaccgataggcaactctagtggcttaattattatacgagcaacaatgtctgaaatgatcattaggattgctccagctaatgcagtaaaaggaattaaatacttatagtttggtggcaataatcgtttactaatattcggtatgataagacccacaaagacgattgatccagctactgctaccgaaataccggctaacatactgatgagcataataatcatccatttgattaattttatgttttgaccgagcccggttgcaatgtcgtcacttgtcatcaaaatattgatgtgtgcagccatgctaaacgcaattaaaataagtatcaatacaagcggaataatccatgggatatcccaaatattacgtaatgaaacggaaccacttaaccagaataataggccttgcaagtctgtttcattcataatgagaatgccttgagtaaaagctgtaaataacatcgcaatcgcggcacccgctaaaatgacacggtgaggtgagaatagggtttgtctaaacatacctagtgcaacgactaagactgtaacaacaatagcccccaaaaacgcgatgacaacaatcattttaaaagattgaatttggataaatgtaatactaaagatgacaaaaaatactgcgcctgcattgacaccgaaaagccctggcgatgctattgggtttcgtgtaagtgcttgcatcaacaaacctgagacggctagtgcggcgcctgtcaatagcgcaatgattgttctcgatgcacgtgcgccagtgacaacatcatgtaaatcgttttcactatcaaagttgaataacgcctgtatcaccgtacctggtgacacaagcgtatttccaatcattaaacttaagatagctactattgcaagacataaaccagcaataacgatttggtattttggtttaagtagcatcgtaaaactccttaattattttgattgtttttcaatatttaacttttcatataaatcgtcaataagttttaatgatgatttatatccgccagctaagttccaagtgatttcatctaaatcatcagatacttggttgtttttaactgcgtctaaatttttccactctttacttgaagtccattcgctttcagtctttttaactaatgcagcatctttcgcatttggatctgattttactacaaaaatatgatcagcgttcattaatggaatgctttctttagatgtaagttggataatatctttaccattatcaacttgtttttgtaagtctttattacgtttgaatcctaaatcatttaagatttcaccagcatatccaccagcataaattcttgtatgatcagcacggaagttaacaactgaagctttcaatggccatgcatctttatactttgcttttgcatctttttggaatgcagctactttatcatcgtactttttaagtaaatcttcagcttctttttctttccctaaagctttccccattaacttagttgtatctttgaatttgaaaactgtatcagtagaaactgttggtgcgattttagataattgatcgtaaactttttcatttctaacttttgacgcgacaattaagtccggttttaatttagagatttcctctaagttaggtgcaggttcttgacctacaatcttagtatcttttaaatcattttttatgtattcgaatttcggtttttgtgtccatgattctacagcacctacaggtttaacacctaaagatacagcgacgtcagtggcaccttgatatagcgtaacaacacgctttggtttccctttaatttcagttgtacccattgcatgtttaattgaagttgtttccttatctttgctatcagatgattgcttatttgaattcccactacatcctgctaaaacaagtaggaaagcaagcgtaacaacaagcattttaattactttattcattgactaattagcctccttcgtgatgtatgacaatgagaatcattatcacgatttagtatgaattaaaatttttcctaagtcaataaaatatttatgatttacatgcaacttataattatttgacatataaatgcataaaaaatataatcctaattacttgatagtgagaatcattatcaattaggtaacacacaatattatagaattttaaatttgaggaggaagcgcttttgattgaaaaaagtcaagcatgtcacgattcattgttagattctgtagggcaaacacctatggttcaacttcatcaactatttccgaaacatgaagtgtttgcaaagttagagtatatgaatcctggaggcagcatgaaagatcgacctgccaagtacatcattgaacatggtattaaacatggtttaatcactgagaatacacatttaattgaaagtacttctggtaatttaggcattgcgttggcaatgatagctaaaatcaagggattaaaactcacgtgtgttgttgatcctaaaatatcaccaacaaatttgaaaattattaaaagttatggtgccaatgtagaaatggttgaagaacctgatgcacatgggggttatttaatgactcgtattgcaaaggtgcaagaactgttagccactattgacgatgcatattggattaatcaatatgcgaatgagttaaattggcaatcccattatcatggtgcaggcacagagattgttgaaacaattaagaaacctatagattattttgtcgcgccagtcagcacgacaggtagcattatgggtatgagtagaaaaataaaagaagtgcatccaaacgcacaaattgttgctgttgatgcgaaagggtcagtcatttttggtgacaaacctattaatagagaattacctggtatcggcgctagtcgtgtacccgaaatattgaatagatcagaaattaatcaagtgatccatgtagatgattatcaatctgctttgggctgtcgaaaactgattgattatgaaggcatatttgctggaggttcaacaggttcgattattgcagcgattgagcagttgataacgtcaattgaagaaggtgcaacaattgtcacgattttaccagatcgaggcgatcgttacttagatttagtttattcagatacatggttagaaaaaatgaaatcaagacaaggagttaaatcagaatgaatagagagatgttgtatttaaatagatcagatattgaacaagcgggaggtaatcattcacaagtttatgtggacgcattaacagaagcattaacagcgcatgcgcacaatgattttgtacaaccgcttaagccgtatttaagacaggatcctgaaaatggacacatcgcagatcgaattattgcaatgccaagtcatatcggtggtgaacacgcaatttcaggtattaagtggataggtagtaagcacgacaatccatcgaaacgtaatatggagcgtgcaagtggtgtcattattttgaatgatccagaaacgaattatccaattgcagttatggaagcaagtttaattagtagtatgcgtactgcagcagtttcagtgattgcagctaagcatttggctaaaaaaggatttaaagacttaacaatcattggatgcgggctaatcggagacaagcaattacaaagtatgttagagcaattcgatcatattgaacgcgtgtttgtttacgatcaattctctgaagcgtgtgcacgctttgttgatagatggcaacaacagcgtccggaaattaattttattgcgacagaaaatgctaaagaagcagtatcaaatggtgaagtagtcattacatgtaccgtaacggatcaaccatacattgaatatgattggttacaaaagggtgcatttattagcaacatttctatcatggatgtgcataaagaagtctttattaaagctgacaaagtcgtagtagacgactggtcacaatgtaatcgagaaaagaaaactattaaccaattggtgttagaaggtaaattcagcaaagaagcacttcatgctgaactaggacaacttgtgacaggtgacataccaggacgtgaagacgatgatgaaatcatattacttaatccgatgggtatggctatcgaagatatttcaagtgcttactttatttatcaacaggcacaacaacaaaatattgggacaacattgaacctatattaagaatgcgaggtgtctgaacattgcagaatcatacagcagtcaatacagcacaaacgataatattaagggatttagttgatgcattattatttgaagatatagccggtattgtatcgaatagtgagattactaaagaaaatggacaaaccattttgatatacaaacgtgaaacacaacaaataaagatacctgtttattttagtgctttaaatatgtttcgttatgaaagttcacaaccaattacgatagaaggaaggacgtctaagcaacctttaacggcagctgaattttggcaaacaatcgtcaaaatgaatcgtgatttaagtcatgaatgggaagtggctcgcgttgaagaaggactgactactgctgccacacagcttgctaaacaattatcagaattagatttagcgtcgcatccttttgtaaggtccgaacagtttgcaagtttaaaagatcgtccatttcatccattagctaaagaaaaaagaggattaagagaagcggattatcaagtgtatcaagctgaattaaatcaatcatttcctttaatggttgcagcagttaaaaagacacaaatgattcatggcgatactgcaaatattgatgaattagaaaatttgacagcacctataaaagaacaagcgacagatatgttacatgatcaagggttatcaatagatgactatgtactatttcctgtacatccttggcaatatcaacatattttgccgaacgtctttgcgaaagagattagtgaaaaattggttgtactattgccgttaaaatttggagattatctatcgtcttcaagtatgcgttcattaattgatatcgcagcgccatataaccatgttaaagtgccatttgcaatgcagtcattaggcgcattaaggctaacgcctacgcgttacatgaaaaacggagaacaagccgaacgattattacgtcaacttatagaaaaagatgccatgttagctaagtatgtcacagtttgtgatgagacagcttggtggtcatatatgggtcaagacaatgatattttcaaagatcaattaggccatttaactgttcagctaagaaaatatcccgaagtgctagccaaaaatgatacgcaacagctagtgtcaatggcagcactcgcggcaaatgatcgcaccttatatcaaatgatttgtggaaaagataatatttctaaaaatgatgtcatgacgttatttgaagatatcgcacaagtctttttaaaggtaacactatcatttatgcaatacggcgcattaccagagttgcatggtcaaaatatattgttgtcatttgaagatggacgtgtacaaaaatgcgtgttacgtgatcatgatactgtcagaatttataaaccatggctaacagcacatcatctttcattgccgaagtatgtcgttagagaagatacacctaacacgctaattaatgaagatttggaaacattctttgcttatttccaaacattagctgtatcggtaaatctatatgccattattgatgcaattcaagatttatttggtgtaagtgagcgtgaacttatgtcgttgttaaaacaaattttaaaaaatgaagtggcaactatttcctgggttacaactgatcagctagctgtcagacacattttatttgataaacagacgtggccatttaaacaaattttattaccattgctatatcaacatgatagtggtggaggtagtatgccttcaggtttaactaccgtaccaaatccaatggtgacatatgattaatcagtctatatggcgcagtacctttcgcattttgtggctcagtcagtttatagcgattgctggactgacagtacttgtgccattattgccaatttatatggcatcactacaaaatctatcagtcgtagaaatacagttgtggagtggtatagcgattgctgctccagctgtaacgacgatgatagcttcgccgatatgggggaagctaggtgataagatcagtcgaaaatggatggtgttaagagcgttacttggtttggcagtatgcttatttttaatggcattgtgtactacaccattacagtttgtacttgtgaggttattgcagggactatttggtggtgttgttgatgcgtcaagtgcgtttgcgagtgcagaggcgccagctgaagatcgtggcaaggtattaggaagactgcaaagttcagtcagcgcagggtctcttgtaggaccattaattggcggtgttacagcttcgatattaggttttagtgcgttactgatgagtattgccgttattacttttattgtctgtattttcggtgcattaaaattgattgaaacgacacatatgccaaaatcacaaacaccaaatattaataaaggtattcgccgttcatttcaatgtctattatacacacaacaaacatgtcgatttattatcgttggcgttttagcaaactttgctatgtatggcatgctaactgcattatcaccacttgcttcatcagtgaatcatacagcgatagatgaccgtagtgtgattggatttttacagtccgcattttggacggcttcgatattaagcgcgcctttatggggtcgctttaatgataaatcatatgttaaatcagtatatatatttgccacgattgcatgtggttgtagtgcgatactgcaaggtttagcgacgaatgtagagtttttaatggctgcaagaatacttcaaggattaacatatagtgcattgattcaaagtgtcatgtttgtcgtcgtgaatgcgtgtcatcaacaacttaaaggcacatttgttggtacgacaaatagtatgttagttattggtcaaattattggtagtcttagtggcgctgccattacaagttatactacaccagctactacgtttatcgttatgggcatagtatttgctgtaagtagtttatttttaatttgttcaaccatcactaatcaaatcaacgatcacacattaatgaaattatgggagttgaaacaaaaaagtgcaaaataaagaattaatacaacatgcagcgtatgcggctatcgaacgtattttaaatgaatattttagagaagaaaatttatatcaagtaccacctcaaaatcatcaatggtctatacaattatctgagctcgaaacgttaacaggtcaattcgcttattggtctgcgatggggcatcatatgtatcatccagaagtatggcttattgatggtaaaagtaagaaattaacaacatataaagaagccattgcacgtattttgcaacatatggctcaaagtgcagataatcaaacggcagtgcaacaacatatggcgcaaattatgtctgacatcgataatagcattcatcgcacggcgcgttatttgcaaagtaacacaatagactacgcagaggatcgctatatcgtttcagaacaatctttatacttaggtcatccgtttcatccgacgcctaagagtgcaagtgggttttcagaagcggatttagagaaatatgcacccgaatgtcatacatcattccaattgcattatttagctgtgcatcaagatgttctgctcacgcgctatgtagaaggtaaagaagatcaggttgagaaagtgttgtatcaattagcagatatagacatatcagagatacctaaagattttattttattaccaatacatccttatcaaatcaatgtgttgcgacagcatccacagtatatgcaatatagtgaacaaggtttgataaaagaccttggcgtttccggtgattcagtgtacccgacgtcttcggttagaactgtattttcaaaagcattaaacatttatttaaaattgccgatacacgttaaaatcactaattttatacgtacgaatgaccttgaacagattgaacggacaattgatgccgcgcaagttatcgtatcagtcaaagatgaggttgaaacaccccattttaaattgatgtttgaagaaggatatcgtgcattgttaccgaatccattagggcaaacagttgaacctgaaatggatttattaacaaatagtgccatgattgttcgtgaagggataccgaattaccatgctgataaagatattcatgtattggcgtcattatttgaaacgatgcctgattcaccgatgtctaagttatcacaagtgattgagcaaagtggtttagcaccagaagcatggcttgaatgttatttggatcgtacattattgccgatattaaagctgtttagcaacacaggcattagtctagaagcacatgtacaaaatacattaattgaatttaaagatggcatacccgacgtatgctttgtcagagatcttgaaggcatttgtctatctagaacgattgctactgaaaaacaacttgtgccaaatgttgttgcagcatcaagccctgttgtatatgcacatgatgaagcatggcatcgtcttaaatattatgttgtagtaaatcacttaggacatttagtgtcaactattggtaaagcgactagaaatgaagttgtgttatggcaacttgtagcgcatcgtcttatgacttggaaaaaagaatacgcgaataacgcagtatttgttgactgtgtagaagatttatatcaaacgccgaccattgcggctaaagcgaatttgatgagtaaattgaatgattgtggtgcaaaccctatttatacacatataccaaatccaatttgtcataacaaggaggtatcgtattgtgaatcaaacaattcttaatcgtgtaaagactagagtgatgcaccaactggtatcatcgcttatttatgagaatatcgttgtgtataaagcgtcatatcaagacggtgtcggtcattttacaatagaaggacatgattcagagtatcgttttactgctgaaaagacacaaagctttgatcgtatacgtatcacatcaccaattgagcgtgtcgtaggagatgaggcagatacaacaacagactatacacaattattgagagaggttgtatttacatttcctaaaaatgatgaaaagctagaacaatttattgtcgagttattacagacagaactaaaagatacacaaagtatgcagtatcgagaatcaaacccaccagcaacacctgagacatttaacgactatgaattttatgcgatggaaggtcatcagtatcatccaagttacaaatcacgtttaggatttacgttgagtgataatttgaaatttggtcctgactttgtaccaaacgttaaactgcagtggttagctatcgacaaagataaagtagaaacgacggtatcaagaaatgttgtagttaaagaaatgttacgtcaacaagttggcgataagacttatgaacattttgtacagcaaattgaagcgtctggcaaacatgtaaatgatgttgagataatacctgtacacccatggcagtttgaacatgtcatccaagttgatttggctgaagaaaggcttaatggcacagtaatatggttaggggaaagtgatgagctatatcaccctcaacaatcgattcgtacgatgtcgccaatagacacgacaaaatattatttaaaggtaccaataagtataacgaatacttcaacgaaacgagtgttggcgcctcatacaattgaaaatgcagcgcaaattacggattggttaaagcagatacagcaacaagatacgtatttaaaagatgaattaaagacagcttttctaggggaagtcttaggacagtcttatttaaatacacaactttcgccttataaacaaactcaagtttatggtgcgttaggtgttatatggcgtgaaaatatatatcatatgttaatcgatgaagaggatgcgataccatttaatgcactttatgcgagtgataaggatggtgtaccattcattgaaaattggattaaacaatatggttctgaagcttggacaaagcaatttttagctgtagcgattcgtccaatgattcatatgctttattatcacggtattgcctttgaatcgcatgcacaaaatatgatgctcattcatgaaaatggttggcctacacgtattgccttaaaagatttccatgatggtgttcgttttaagcgtgagcatttaagtgaagctgcttcacacctgacattaaagccaatgccagaagcacataaaaaagtgaatagtaattcatttattgaaacagatgatgaacgtttagtacgtgactttttacatgatgcatttttctttattaatatcgccgaaatcatcttatttattgaaaagcaatatggtatcgatgagaagctgcaatggaaatgggttaaaggcatcatcgaggcgtatcaagaagcatttccagagttgaataactatcaacattttgatttgtttgaacctacgattcaagttgaaaagttaacgacacgtcgattattaagtgactccgagttaagaattcatcatgttacaaatccattaggtgtaggaggtattactgatgcaacaattatctctgaaacatagattaaacaatggtgattcagtttatggcatttttaattctataccggacccattgatgatagaggttatcgcagcaagcgggtatgactttgttgtgattgatacagaacacgtggcgattaatgatgagacactagcgcatttaattcgtgcagctgaagcagcgcatattatacccattgtacgtgtcactgcagtgatagatagagatatcattaaagtgttagatatgggtgcgagaggtattattgtgccacatgttaaagatcgtgagaccgttgaacatattgtgaaattaagtcgttattacccgcaaggattaagaagtttgaatggtggtcgcatggcaagatttggacgtacaccattacttgatgcaatggagatggctaatgaacatattatggtgattgccatgatagaagatgttgaaggggttatggccattgatgatatagcacaagtcgaaggtttagacatgatagtcgaaggtgccgcagatttatcccagtcacttggcataccatggcaaacgcgtgatgatcaagtaacatcacatgttcaacatatttttgaagttgtgaatgctcatggtaaacatttttgtgcattaccacgtgaagatgaagatattgcaaaatggcaggcgcaaggtgtaaaaacatttattttaggtgatgatcgcggaaaaatatatcgccatttaagtgcatctctagcgacgtctaaacagaaaggggatgaaggctaatgcgtatagttcaacctgttattgaacaattaaaagcacaatctcatccagtttgtcattatatctatgatttagatgagctgaaaagtcacttgcaacatattacatcgtcattgcctagtaattgtcagatgtactatgcaatgaaagcaaatagtgaacgaacaatcctagatacaattagtcagtatgttgaaggattcgaagttgcatctcaaggtgaaatagcaaaaggtcttgcttttaaaccagcaaatcatattatttttggtggccctggtaagacagacgaggaactaagatatgcagtaagtgaaggtgttcagcgtattcatgttgaaagtatgcatgaattacaacggctaaatgccatcttagaagatgaagataagacacaacacattttattgcgtgttaatttagcaggaccatttcccaatgcaacgttgcatatggcaggacgcccaacacaatttggtatttctgaagacgaagttgatgatgtcattgaagctgcgctagcaatgtcaaatattcatctagatggatttcattttcattctatttctaacaatttagactcgaatttacatgtcgatgtagtgaaactttattttaaaaaagcaaaggcatggtctgaaaaacatcaatttcctctcaaacatatcaatcttggtggtggcataggcgttaactatgcagatttaactagccaatttgagtgggataattttgtagaaaattttaaaacacttatcgttgagcaagaaatgggagatgtgacattgaactttgaatgtgggcgctttattgtggcacatattggttactatgtgacagaagtgctagatatcaagaaagtacatggtgcttggtatgccattttaagaggaggtacgcaacaatttagactgccggtatcttggcagcataaccatccttttgaaatttatcgctataaggacaatccatattcatttgaaaaagtttcaatttcgagacaggacacaacattagtcggacagttatgtacaccgaaagatgtctttgctagagaagtacagatagatgcaatcagtacaggcgacgttattgttttcaaatatgcaggtgcatacggatggtctatttcacatcacgatttcttaagccatccacatcctgaatttatttatttaacgcaaacaaaggaggatgaataactattgaatcatattcatgaacatttaaaattggtaccagtagataagattgatcttcacgaaacattcgaacctttaagattggaaaagacgaaaagtagtattgaagcagatgattttatacgtcatcctattttagtgacagcgatgcaacatggtagatatatggttatagatggtgtgcatcggtatacaagtttgaaggcgttaggatgtaagaaagttccagtgcaagaaatccatgaaacacaatattcaattagtacatggcaacataaagttccatttggtgtgtggtgggaaacgttacaacaagaacatcgcttgccatggactactgagacaagacaagaagcgccatttattacgatgtgtcatggtgatacagaacaatatttgtatacaaaagatttaggcgaagcacattttcaagtatgggaaaaggttgtcgcaagttatagtggttgttgttctgtagagagaattgcacaaggtacatatccttgtctttctcaacaagatgtactcatgaagtatcagccattgagttataaggaaattgaagcggttgttcataaaggggaaactgtgccagcaggtgtgacacgctttaatatttcaggacgatgtcttaatcttcaagtaccgctggcattacttaaacaagatgatgatgttgaacaactgcgcaattggaagcagtttttagcagataagtttgccaatatgagatgctatactgaaaaagtatacttggtggagcaatagttttactgtgatgttgagggaaatatgatgatttagcgtattgatagcgaaaatataataaaacaatatagtgtggagaacttttgatattttataaatattgaagttctccatttttgtattttgcatataaaaattaaataaaataaggtatattaaggtaaagtataaatattaaataaatggggaataatcatgaacatgaatttaattataggaaaaatcgctatttggataggcatcgtagttcaaatatgttatagcgtcgttattgttagtataacaaccttcatcctttttataaatgctaaaggagcaagcccggaaatagctgttttaatagcattagtaatcattcttatcttaactttaccacctatcctaaccgcgattaacttagagaataaaatggaagtaaaaggtacgctttttattgtttatgcgattgtggcattttgtatgtttaattacctttcatcaattttatgggtggtttgcggcatttttcttatttggactaaatattcaaaagatgggtcaacaggtaagaatgaaaataaaaaagttgatattgaaagtacagagaatcaatttgaatctaaagataaaaccactaaagaataaagagaatatttgaggcggagtataaatattaaataaatggggaatgagcatgaggaaaaatataggaagaataacaatttggataggcatcgtagctcaaatatattttagtgtcgtttttgttaggatggtatctattaatattgctggaggctctgattacgaaacaatttttttattaggattaatattgactcttttcactgttttaccaaccatctttactgcgatttatatggaaagttactccgtaatcggaggtgcactttttatagtttatgcgattattgcactgtgtttatataattttctttcgtcaattttatggctgattggtggtattttgctgatttggaataaatactcaaaagatgaatcgacagacgatgatgaaaataaaaaagttgatattgaaagtacagagaatcaatttgaatctaaagataaaaccactaaagaataaagagaatatttgtggtaacttataaattttaaataaatgaggaatagacatggaaaaaatgtagaaaaatcaattataaagatagatttgtattttcaaatagcttatatagtactcatggctataactttatgtgggtttgtaatttgctatggattaattttcggccttttctatttattatcaggtagcacagctgattatttaatagtaacaatagttatatcggcaataatttctatatttgtaattatactttcaatcgtacctgtcatcgtattggcatctgacttatttaaagaaaggatttcaaaaggtgtcatattaattgtattggctattatcgctttagtattatgcaactttgtatctgcaatactctggtttgtttcagccatatctattttaggtagaaaaaaattagtatctacagcagatactaccactattcaaaaaagtaaagggaacgcaaatcaagcatcacataaagacgcgtgtaaaaaggaacttgatagtcaagacatgatggaacatcctgagtttaaaaatcccacgactaaaaaccttgaaggattaaacgaagaaatacataaagatgaagctacaactaaagttgacagtgataacacggatccgccgattgaatcaaaagaccatgtctcgaaaaaagattgatgacaaactaatcgagagacttaaaaaaataatattcaacataagcacttttaaaacgacatttaaacgcattgccaataactaatggtagtgcgtttaactataccttaaatatctgaatattttgttaaatagagttacctttgttgtactattcaaatgaagaggagtaaaatgtaattaaaggaaagtaatttgaggagtgatctttatgacaaacaacaaagtagcattagtaactggcggagcacaagggattggttttaaaattgcagaacgtttagtggaagatggtttcaaagtagcagttgttgatttcaatgaagaaggggcaaaagcagctgcacttaaattatcaagtgatggtacaaaagctattgctatcaaagcagatgtatcaaaccgtgatgatgtatttaatgcagtaagacaaactgccgcgcaatttggcgatttccatgtcatagttaacaatgccggccttggaccaacaacaccaatagatacaattactgaagaacagtttaaaacagtatatggcgtgaacgttgcaggtgtgctatggggtattcaagccgcacatgaacaatttaaaaaattcaatcatggcggtaaaattatcaatgcaacatctcaagcaggcgttgagggtaacccaggtttgtctttatattgcagtacaaaattcgcagtgcgaggtttaacacaagtagccgcacaagatttagcgtctgaaggtattactgtgaatgcctttgcacctggtatcgttcaaacaccaatgatggaaagtatcgcagtggcaacagccgaagaagcgggtaaacctgaagcatggggttgggaacaatttacaagtcagattgctttgggcagagtttcacaacccgaagatgtttcaaatgtagtgagcttcttagctggtaaagactctgattacattactggacaaacaattattgtagatggtggtatgagattccgttaataatcatccactaatgataaataaatccttattgttaagtttaatcacttagcggtaaggattttttagtgcacttagaagggattgtattgatagaaaattaataaccgaagttcctaagtgagttatgatgtcacagtctaatgcatcagttgaaagcgatactaaattccacccagcatagttacgctaaaacatcataaaacaccactatctaatttatctgcataaaaattcacaaagttatctcattttatttttataaataaaaaatatcgataaaaagcttacaatactttatgtttttgtgatatatttttaatgtataaatgaggtgaaagatttggaaaaagttttgataactggtggggcaggatttatagggtctcatttagtagattttttgagccaagactatgatgtttatgtgctggataattatagaacaggaaagcgtgaaaatattaaaaatttagctgatgatcatgtgtttgaactagatattcgtgagtatgatgcggttgagcaaatcatgaaaaagtatcagtttgaatatatcattcatttagcagcattagtaagtgttgctgagtcggttgagaagcctattttatctcaagaaattaatgttgtagcaacattaagattgttagaaaccattaaaaaatataacagtcatataaaacgattcatctttgcatcatctgcagccgtttatggtgatttacctgatttacctaaaagtgatcaatcattaattctaccattatcaccatatgcaatagataaatattacggcgaacgtacgacattaaattattgctcgctatataacattccaacagctgttgttaaattctttaatgtatttgggccaaggcaagatcctaagtctcaatattcaggtgtgatttcaaaaatgttcgattcatttgaacataacaagccttttacattttttggcgatggtctgcaaacgagagactttgtttatgtttatgatgttgttcaatctgtgcgtttaattatggagcataaagatgcggttggacatggttataacattggtacgggtacatttacgaatttgctagaggtttatcgcattattggtgaattatatggaaaatcagtcgagcatgattttaaagaagcaagaaagggagatattaagcattcttatgcagatatttctaatttaaaagcattaggatttgttcctaaatatactgtagaaacaggcttaaaggattactttaattttgaggtagataatattgaagaagttacagcgaaagaagtggaaatgtcgtgaaaatgatattgaagctgtccataataataaggattacgcctatcaaagaaaattagtcgcactagaagaagtaaaaaagggctattttccaatcaaacgtgcgattgatttaattttaagcattgttttattatttttaactttaccgattatggttatattcgcaatcgctatcgtcatagattcgccaggaaaccctatttatagtcaggttagagttgggaagatgggtaaattaattaaaatatacaaattacgttcgatgtgtaaaaacgcagagaaaaacggtgcgcaatgggctgataaagatgatgatcgtataacaaatgtcgggaagtttattcgtaaaacacgcattgatgaattaccacaactaattaatgttgttaaaggggaaatgagttttattggaccacgcccggaacgtccggaatttgtagaattatttagttcggaagtgataggtttcgagcaaagatgtcttgttacaccaggattaacaggtcttgcacaaattcaaggtggatatgacttaacaccacaacaaaaattaaaatatgacatgaaatatatacataaaggtagtttaatgatggaactatatatatcaattagaacattgatggtagtgattacaggggagggctcaaggtagtcttagtttgtatagaaaaatcaaatacaagatgcattttcaaaattgtggctggttgtcacagtggaacatgtagtcccttgaaatgatctcaaattgtataaagcaatggttattctgacgtgaacttataaagtgataatgcatagttagtttgttcatcaccagaggtatctacgttaagaaattgaaagaagcgtcttaaaggggtttgtaacagttgaaaattatatattgtattactaaagcagataatggtggtgcacaaacacacctcattcaactcgccaaccatttttgcgtacaccatgatgtttatgtcattgtaggcaatcatggaccaatgattgaacaactagatgcaagagttaatgtaattattatcgaacatttagtaggtccaattgactttaaacaagatattttagctgtcaaagtgttagcacagttattctcgaaaattaaacctgatgttatccatttacattcttccaaagctggaacggtcggacgaatttcgaagttcatttcgaaatcgaaagacacgcgtgtagtttttactgcgcatggatgggcttttacagagggggttaaaccagctaaaaaatttctatatctagttatcgaaaaattaatgtcacgtattacagatagcattatttgtgtttcagatttcgataaacagttagcgttaaaatatcgatttaatcgattgaaattaaccacaatacataatggtattgcagatgttccagctgttaagcaaacgctaaaaagccaatcacataataatattggcgaagtagttggaatgttgactaataaacaagatttacagattaatgactcgacaaaacaccaatttgttatgattgcaagatttgcttatccaaaattgccacaaaatctaatcgcggcaatagagatattgaaattacataacagtaatcatgcgcattttacatttataggcgatggacctacattaaatgattgtcagcaacaagttgtacaagctgggttagaaaatgatgtcacatttttgggcaatgtcattaatgcgagtcatttattatcacaatacgatacgtttattttaataagtaagcatgaaggtttgccaattagcattatcgaagcgatggctacagggttgcctgtcatcgctagtcatgttggtggcatttcggaattagtaactgataatggtatatgtatgatgaacaaccaaaccgaaactattgccaaagtcctggaaaaatatttaatagacagtgattacatcaaaatgagtaaccaatctagaaaacgttatttagaatgttttacagaggagaaaatgattaaagaagtggaagacgtttataatggaaaatcaacacaatagtaaatatctaacattgttacttatcggtttagcggtttttattcagcaatcttcggttattgctggagtgaatgtatctatagctgactttattacattgctaatattagtttatttactgttttttgctaaccatttattaaaggcaaatcattttttacagtttttcattattttgtatacataccgtatgattattacgttgtgtttactattttttgatgatttgatatttattacggttaaggaagtacttgcatctacagttaaatatgcatttgtagtcatttatttctatttagggacgatcatctttaagttaggtaatagcaaaaaagtgatcgttacctcttatattataagcagtgtgactataggtttattttgtattatagctggtttgaacaagtcccctttactaatgaaattgttatactttgatgaaatacgttcaaaaggattaatgaacgaccctaactatttcgcgatgacacagattattacattggtacttgcttacaagtatatccataattacatattcaaggtccttgcatgtggtattttgctatggtcattaactacaaccggatctaagactgcgtttatcatattaatcgtcttagccatttatttctttattaaaaagttatttagcagaaatgcggtaagtgttgtgagtatgttagtgattatgctgatattactttgttttaccttttataatatcaactactatttattccaattaagcgaccttgatgccttaccgtcattagatcgaatggcgtctatttttgaagagggatttgcatcattaaatgatagtggatctgagcgaagtgttgtatggataaatgccatttcagtaattaaatatacattaggttttggtgttggattagtggattatgtacatattggctcgcaaattaatggtattttacttgttgctcataatacatatttgcaaatttttgcggaatggggcattttattcggtgcattatttatcatatttatgctttatttactgtttgaattatttagatttaacatttctggaaaaaatgtaacagcaattgttgtaatgttgacgatgctgatttactttttaaccgtatcattcaataactcaagatatgtcgcttttattttaggaattatcgtctttattgttcaatatgaaaagatggaaagggatcgtaatgaagagtgattcactaaaagaaaatattatttatcaaggtctataccaattgattagaacgatgacaccactgattacaatacccattatttcacgtgcatttggtcccagtggtgtgggtattgtttcattttctttcaatatcgtgcaatactttttgatgattgcaagtgttggtgttcagttatattttaatagagttatcgccaagtccgttaacgacaaacggcaattgtctcagcagttttgggatatctttgttagtaaattattattgtcgctaacagtttttgcgatgtatatcgctgtgattacaatatttatagatgattactatcttattttcctactacaaggtatctatattataggtgcagcactcgatatttcatggttttatgctggaactgaaaagtttaaaatacctagccttagtaatattgttgcgtctgttattgtcttaagtgtcgttgttatctttgtcaaagatcaatcagatttatcattgtatgtatttactattgctattgtgacggtgttgaatcaactgcccttatttatttacttgaaaagatatattaccttcgtttcggtgaactggagacaagtttggtatatatttcattcatcattagcttatttattacccaatggtcaactcaacttatacactagtatttcatgcgttgtacttggtttagtaggtacgtaccaacaagttggtatcttttctaacgcatttaatattttaacggtcgcaatcataatgattaatacatttgatcttgtaatgattccgcgtattactaaaatgtctatccagcaatcacatagtttaactaagacgttagcagataatatgaacattcaattgatattaacaatacctatggtcttcggtttgattgcaattatgccatcattttatttatggttctttggtgaggaattcgcatcaactgtcccattgatgaccattttagcgatacttgtattaatcattcctttaaatatgttgataagcaggcaatatttattaatagtgaataaaataagattatataatgcgtcaatcactattggtgcggtaatgaatttagtattatgtcttgttttgatatatttttatggaatttacggtgctgctattgcgcgtttaattacagaatttttcttgctcatttggcgatttattgatattactaaaatcaatgtgaagttgaatattgtaagtacgattcaatgtgtcattgctgccgttatgatgtttattgtgcttggtgtggtcaatcattatttgcctcctacaatgtacgctacgctgctattaattgctattggtatagtagtttatcttttattaatgatgactatgaaaaatcaatacgtaaggcaaatattgaggcatcttcgacataaaacaatttaattatcggtaacgctatactttagaaatttaagattaagaagaaaaggcaatttcttattgaaaaatggaagttgtcttttttaattctctttaaaagcgggaaacaaaagcagttaaatgcctttttgcattcaatattaaatattatatcaatttcgaatatttaaattttatataattggatataacaaataaataataattattgcaaaacacacccgaaattaattattataaaagtatattcataaaaggaggaatatacttatggcatttaaattaccaaatttaccatatgcatatgatgcattggaaccatatatagatcaaagaacaatggagtttcatcacgacaaacatcacaatacgtacgtgacgaaattaaacgcaacagttgaaggaacagagttggagcatcaatcactagcggatatgattgctaacctagacaaggtaccggaagcgatgaggatgtcagtccgtaataatggcggtggtcattttaaccattcattattctgggaaatactatcacctaattctgaagaaaaaggtggcgtaatagacgacattaaagcgcagtggggcactttagatgaatttaaaaatgaatttgcaaataaagcaacaacgttatttggatcaggttggacttggttagttgttaatgatggaaaattggaaattgtgacaacgccaaaccaagataatccattaacagaaggcaaaacgccaatcttactatttgatgtttgggagcatgcctactatctgaaatatcaaaataaacgtccagactatatgactgcattttggaatattgttaactggaaaaaagttgatgaattataccaagcagcaaaataatataacttaatataattgaggtggagcatctacaaggtgtttcaccttttttgtgcttaatatctttacttattcgtttttatgtaatgggatagcacgtaaaaatggcaaaataataagataaatttcaactcgaaataccttattgttgttgactataacgatgacctaaatgttatatacgtcagacaacactattaattaatcaacatattgacattaaataaattgacaaaataagtaattattgcgaacctaaagtgaaatttttataaaaaattgtaatgattcaaaaattttgttgcatttcttttgtaatcatatgataatttaaatgtaatcaaattgtaatataaggggaaaagacaatgaaaaaattagcaacagtaggttctttaattgtaacaagcactttagtattctcaagtatgccttttcaaaatgcgcatgccgacacaacttcaatgaatgtgtcgaataaacaaagccaaaatgtacaaaatcatcgcccttatggcggagtagtaccacaaggaatgacgcaagcacaatatactgaattagagaaagctttaccccaattaagcgctggcagtaatatgcaagactataatatgaaattgtatgatgcgacgcaaaatattgctgataaatacaatgtgataattacaactaatgtaggggtatttaaaccacatgctgttagagatatgaatggtcatgcattacctttaacaaaagatggcaatttttatcaaacgaatgtagatgcaaatggtgttaatcatggtggtagtcaaatggtgcaaaataaaacaggtcatatgagtcaacaagaccatatgaatcagaacacacacatgaaccaacagccacacatgcaacaaggtcatatgcaatcatcaaaccatcaaatgatgagtccaaaagcaaatatgcatccatcaaatcatcaaatgaaccaaagtaacaaaaaagttttaccagctgctggtgaaagtatgacatcaagtattcttactgcaagtgttgccacactactattagtatctgggttattcttagcatttagacgacgttcaacaaataaataaacataatacgattaataatagaaaaatcgtgtgattatctgagcgagcctaggacataaatcaatgtcctaggctcgctaatgttatattggcagtagttgactgaatgaaattgcgcttgtaacaagcttttccatttcttgcccacttcctaaatagtcatcacaaaatttcttatatttcaataattttaataatccgattgtcttatacgtgtcagtgttaattcagatatttcctgtggaatataccacttattaatcataatcggatagggcgtttgtgcgtacaatgtttcaataatcagccaacaatgtgtatcaccatcaaacacgtgactatgatttttgaagtggggcgctttggtaatagacatttttaaatctgattgatatgcattgctataaatcgtttgctcaacgaacgtcttcatgtcgtcttcgttttgtgtattcactttaaatgtgtcaatgacatttaacggtataaaggtaaaacaaaatgcatcagcttgcttagaatgattgtcctttttttgataatagcgttccattgcaatgacggcagaaggatggtttgcaaacaaatgatttgtatattcactttctaaatcaacacgataattaattgatgacatagatacgcgagctagcaatatttgatcaagtggatgcttaaattgatccatacttgaagcgtgttgggcatttgtttgtggaataacaaagtgtcccttccctcttgtactctctacgatgccatcttcggctaacaattttatagcttggcgcaaagtcatacgactgacatcaaagcgcgcacaaagttccttttcagtaggtaatgcatggccactcggatattttcctatttgaatttctttatataacgtattataaatcgttaaaaattttggttgtgtttgcgtcacgtagacaacctccataaagttacttaatcaatctcatcatacaataatttttactcgaattggaaaaattataaaaattaaacatagaaacaacttgaacattggttttatgcaagatcagtagagataactgtaaaatgttcttaatattgtcaaaatgtaatgcttgaaagcgcttttaaaaaatattattatatacatggttagacaaatagacaaatcactatacaaatattgggaggaatattttatgaaatcaacaccacacattaaaccaatgaatgacgtcgaaattgcagaaacggttctattgccagaagatccgttaagagctaagttcattgcagaaacatatttggacgatgtggaacagttcaatacagtgcgaaatatgtttggttttaccggaacatataaaggtaaaaaagtttctgtcatgggttcaggaatgggtatgccatctattggcatttactcttatgaattaattcatacatttggttgtaaaaaattaattcgcgttggttcttgtggcgcgatgcaagaaaatattgatttatatgatgtgattattgcacaaggtgcctctactgattcaaattacgttcaacaatatcaattaccaggtcattttgcgccaattgcttcttatcagttattagaaaaagcagttgaaacagcacgtgacaaaggtgtacgtcatcatgtaggtaatgtgttatcaagtgatattttctataacgcggatacaacagcgagtgaacgttggatgcgtatgggtattttaggtgtagaaatggaatcagctgcattatacatgaatgcaatttacgctggtgtcgaagcattaggtgtgttcacagtgagcgatcatttaattcatgaaacgtcaacaacacctgaggaaagggaacgtgcatttacagatatgattgaaattgcactgtcattggtgtagatgattatgaatgttgaatattctaaaataaagaaagcagtacctattttattattcttatttgtattcagtttggttatagacaactcatttaaattgatttctgtagccattgctgatgacttaaacatttctgtaacgacagtaagttggcaagcgacattagccggtttagtaattggtattggcgctgtagtatacgcttcattatctgatgccattagtatacgcacactatttatttatggcgtgatattaatcattatcggatcaattattggttacattttccaacatcaattcgcattacttttagttggacgtattattcaaactgcaggtttagctgctgcagagacattatatgtgatatatgttgcaaagtatctttctaaagaggaccagaagacttaccttggcttaagtacgagcagttattccttgtcattagttatcggtacattatcaggtggatttatttctacgtatttacactggacaaatatgtttttaattgcattaatcgtagtatttacgttgccattcctatttaaattattaccaaaagaaaataatacaaataaagctcatttagattttgttggcttaattctagtggcaactatcgctacaacagtcatgctgtttattacgaactttaattggttatatatgattggtgccttaattgcgattatcgtttttgcgctatatattaaaaatgcgcaacgtccattagtaaacaaatcatttttccaaaataaacgttatgcttcatttttatttatagtatttgtaatgtatgccatccaattgggttatatttttacgttcccattcataatggaacaaatttatcatcttcaactagacacaacatcattgttattagtaccgggttatattgtagcagtcatcgttggtgcactaagtggtaaaatcggcgaatatcttaattcaaaacaagcgattatcacagcaattattttaatcgcactgagcttgattttacctgcatttgcagtaggtaatcacatttcaatcttcgtcatttctatgatattctttgcaggtagctttgctttaatgtatgcacctttacttaacgaagccattaaaacaatagatcttaatatgacaggtgtggctattggtttttataatttaattattaatgtggcggtatctgtaggtattgcgattgctgcggctttaatcgattttaaagcattaaatttcccaggcaatgatgcattaagttcacatttcggtattattttaattattttaggtttaatgagtattgtcggattagttttattcgtcatcttaaatcgttggacacaatctgaaaaataaatagatataaattcgcgagatatattcgtatttatagtaaaattaaataaagagattatataacacgaggagtagtaagtatgaaatttgagaaatatatagatcacactttattgaagcctgagtcaacacgtacgcaaatcgatcaaatcatcgatgaagcgaaagcatacaattttaaatctgtatgtgtgaatccaacgcatgttaaatatgcagcagagcgactagctgattcagaggtgctcgtttgtacggtaataggattcccattaggagcgtcgacaacggcaacgaaagcatttgaaacagaagatgcgattcaaaatggtgcagatgaaattgacatggtcatcaacatcggcgcattaaaagatgggcgttttgatgatgtacaacaagacattgaagcagtcgttaaagctgcgaaaggtcacacagtaaaagtgattattgagacggtattgttggaccatgacgaaatcgtaaaagccagtgaattaacaaaagcggctggtgcggacttcgttaaaacttcaacaggttttgcaggtggcggtgcgactgcagaagacgttaaattaatgaaagatacagtaggtgctgatgtagaagtaaaagcatcaggtggcgtacgtaatttagaagatttcaataaaatggttgaagcaggtgcgacacgtattggtgcgagcgcaggtgttcaaattatgcaaggtttagaagcagattcagattactaatatatataaaatttgggagtgatagctatgacaagaccatttaatcgtgtacatttaatcgtaatggattcagtaggtattggtgaagcgccagacgcagctgattttaaagatgaaggttcacatactttaagacataccttagaaggcttcgatcaaactttaccaaaccttgaaaagttaggtctagggaacatcgataaattaccagtagtaaatgcagttgaacaaccagaagcatactatactaaattgagtgaagcttcagttggtaaagatacaatgactggtcactgggaaattatgggattaaatattatgcagccttttaaagtataccctaatggattccctgaagagttaattcaacaaattgaagaaatgacaggtcgtaaagttgttgctaacaaaccggcatcgggtacgcaaattatcgatgagtggggcgagcaccaaatgaaaactggtgacttaattgtttatacaagtgcagacccagtattgcaaattgctgcacatgaagacattatcccattagaagagttatatgatatttgtgaaaaggttcgtgagttgacaaaagaccctaaatatttaattggtcgtattatcgcacgtccatatgttggtgaaccaggaaactttacacgtacatctaatcgacatgactatgcgttaaaaccatttggtaaaactgtcttagatcatttgaaagacggtggttatgatgttattgccatcggtaaaattaatgacatttatgatggtgaaggtgtaacagaagcggttcgtacgaagagtaacatggacggtatggatcaattgatgaaaattgttaagaaagatttcacaggtattagcttcttaaacttagtagactttgatgcattatacggtcatcgtcgtgataaaccgggttatgcacaagcaattaaagatttcgatgatcgcttgccagaactgtttagcaacttaaaagaagacgatttagtaattattacagcagaccatggtaatgacccgacagcgccaggtacggaccatacgagagaatatatcccagtaattatgtatagtccgaaatttaaaggtggtcatgcactagaaagtgatactacattcagttctatcggtgcaactatagcagataatttcaacgtaacattaccagagttcggtaaaagttatttaaaggaattgaaatagaataaatttagatattataaaaacagcagtgaagttaactataacaatagttttcttcactgctgtttttattataatagagaaacgtaagacggtaggacctcttatttaggagtatcctgatttaatgttaaacaatacgttttcggattgaaccggaaattaaatcgacaattgcgaccattagtactaaaccgattaatataatacctacacggtcccaagaacgtgtttgaatggcaaatatgagtggtgtcccgataccaccagccccaattagccccagtatagaagctgaacgtaagtttagttcaaagcgataaagtatgagtgatagaaaggcaggcataatttgtggtatgactgcaaatacgagtgttttaatcttattcgcaccactggcctttaatgattctacagcactgaaatctagaccttcaatatcttcagctaaaagtttcccaagcatacctacggaatggatacctaaagctaatacacctgaaaatgaacctgggccaacagctttgataaatataagtgccattacaatttctgggaagacacgtataacacttaaaataaatttgcttacacctgaaactgggcgtagctttaccatattatttgcacctagaaatgctaatggaatacagataattgcggcgatgaaagtacctacaacggctatcgcaaaggtttcaagtaaaccacgtaataagtcttcgccatctggtatatagatatagctgatatcaggatggaataatccgctgaatatggattttaagatttctaatgatttacttttaagttctaaacttggtacacctgcaaatgcccagatgataatagctaagacgacaattgcaataagccatcttttaatcaattttcgtttgtgtgcttttgtgtgaacattatattttgctatttcctgtgtcatgcgagatgtgccctcactttcgtactgatgtaatcaatgacgacgacgataactaaagtaaataaaataatcgttgctgtttttggatattgaaataaaccaagtgtttgatcataaaacaatccaataccgccagcgccgactaatccaagcacagctgaagcacgtatatttacttcaaatgcatataatacgtatgacataaatgacgatatggcttgtggtacaacaccgaaaacaatccattttattttattagcgccaacagccgtcattgcttccattggacctggatctatcgtttccaatgattcatataataattttccaataatacagatagttaaaataaacaatgctaatatccctggaatttgaccgattccaaatacagccacaaagattgctgctaatagcaaatccggtatagtacgaactatatttaaaataaaacgcgagggtattgaaatccacttttgatgaacgatattgctagcacataataacgcaattggtattgaaacgatgctacctaatactgtacttacgatagccattcgaatggtatctaacattggcgttgtaatttgttgtaaatactcgaaatcaggtggaatcatttgtttgaatagatcacctatttgaggtattcctatcattaaatctccaaaattaaaccccgtataaatgaagctccaaatgataagcacaatgattaacatgaaggtaaaactcgtttttaaagaaacctttttctttaaaagggagtcatactttgtaggtgtttctaaaggcatgttagttcactcctagcttttcatcttctttaattgtacgtccatatatttcactaaatacgtcatctgttgcttcagatgcaggaccatcatagacaacttcaccatcacgtaaaccaatgatgcgtgtgccatattcttttgccaagtcaacaaaatgtaaattaattaaaattgtgatgcctaattcttggttgatttttcttaaatcatccataacctgtttcgttgttaatgggtctaatgaagcaactggttcatctgcaagaataatttcggattcttggcatagcgcacgtgcaatagatatacgttgttgttggccacctgataattcatcagagcgttgattatatttatctaagatgttgacccgttctagtgcatccattgctttaattttgtcttcttttggaaataaacctaataccattttccaagtagggtgataacctacacgtccacttagtacatttcgtaatacacttgaccgtttaactaaattaaaatgttggaaaatcatacctatatttcggcgcatttctaataatgctttaccatgggctttagtgattgatttaccttgaatgaaaatttcacctgacgtgatatcatgcaaacgatttacagatcttaatagcgtggatttcccagcaccagatagtccgacaatgactgcaaattcacctttttcaatatttaagttaatatttttcaagcctacatgaccgttaggatagactttactgacgtttttaaattcgatttgactcatgtttgacacctttctttaataaagaaaagccaaggtaaactgaaatatcatagacattgggtttctgtgtacaaatggtttcaaatgtacagcgacacctttctatatctgtttcagtttagcgcctagcttttcaatattaatctagaatatatctattgaacgaaagcttttaataccaaattcgataatgattcattggttaaataatgattatttcatatctttaactaatttttcgtactctcttacaatgtcgaaatttgaatctttcgtttctgtgtatccttcatgtgaataaacttcgctaataattttgtgaccttcttttgatttagcaatgtctataaaagcttttttcaatttttcttggaaatctttatccatatctggtcttacagaaattgtgtcattcggaatagcttgtgttaattttaaaattcgtgtgtctttaaatacatttggttggtcttttttcacagtattacgtgcatcgttaaatacagccgcagcatctacatctccatttaataatgagataactgcttggtcatgacctttaacattcacaattttcatatctttagttgcattaatacctgcttcgttttttaacatcgcaagtgggaatgtatatccagcagttgatgttacatcttgtaaggcaattttcttaccttttaaatctttcaagcttttaatttttgagtcttttttaacaagaatttctgatttataactatctacaagttctttacttgctgaaccatcttcttttacaccaaaacgttgtgcttgtaataataaatcagctgctttttgatcatgtgctaatgtgtatgccgttggtggtaagaaaccaacatcaacttttttagacttcatagcttcaacaattgtattgtagttagttgatacagacactttaactggaatccctaattctttagatagtaatttttctaatggttttgctttagcctctaatgttccagcattttgcgaaggtacaaattgtactgttaattctttaggtttgtatcctcctgatttagaatccgaatcattactagcgttcttttgattatctaaagaacttgaatttccacatgctgccgcaaaaacaatgactgctaacattaatacaaataaacacttaaaatttttcatttgataactgtccccttcacattcttaatcgtgtaatatgtatgcaatgaaattacacttatagcgtaccacatttaaatgcgaaaaagtattttataaaaatgaattttaataactttctttaagagtttgataatattttgtaaatttttcgttaaattgcccattccaaacatatatttatcctataattcaagaacaaatttattttaaaaggagcctcacaaaatgaaaaaaatatataagtcattaactgtctctgcaattgttgcaacggtatcattaagtgctttaccgcaatctttagctataacgcatgaatcgcaacctacaaagcaacagcgaacggtattattcgatcgttctcatggtcaaacagctggtgctgcagattgggttagtgatggtgcattttcagattatgcggattcaatacaaaaacaaggctatgacgttaaagctattgatggtcattcgaacataacagaagcaagtttgaaaagttccaaaatatttgtaattcctgaggctaacattcctttcaaagaatcagaacaggcagcaattgttaactatgtgaaacaaggggggaatgttgtctttatttcagatcattacaatgctgaccgaaatttaaatcgtattgattcatcagaggcaatgaatggttatcgacgtggagcgtatgaagatatgtcgaaaggtatgaatgcagaagaaaaaagttctactgcaatgcaaggtgtgaaaagttcagattggttatctacaaactttggcgtacgttttcgatataatgcactaggtgatttaaatacgagcaatattgtttcttcaaaagaaagtttcgggattactgaaggtgtgaaatctgtatctatgcatgccggatcgacattagcaattactaatccagagaaagcaaaaggtattgtgtatacaccagaacaattgccagcgaaaagtaaatggtcacatgctgtagatcaaggtatttataatgggggtggtaaagcagaaggcccctatgtagcaatttctaaagttggaaaaggtaaagcagcatttatcggtgattcatcacttgtggaagatagttcgcccaaatatgtaagagaagataatggagaaaagaagaaaacatatgatggttttaaagaacaagacaacggtaagctattaaataatataacggcttggatgtctaaagataatgatgggaaatcacttaaggcgagtggcctaacattagatacaaagactaagttgcttgattttgaacgaccagagcattcaactgagcctgagaaagagccatggtcacaaccgccgagtggttataaatggtatgacccaacaacatttaaagcaggtagttatggcagcgaaaaaggcgcagatcctcagccaaacacaccagatgatcatacgccaccaaatcagaacgaaaaagtatcatttgatatcccgcaaaatgtttctgtaaatgagccatttgaagtgacaatatatttaaaaggatttgaagcaaatcaaacacttgaaaatcttagagttggtatttacaaagaaggcggacgtcaaatcggacaattttcaagtaaagataacgattataaccagccaggttacagtactttgccaacagttaaagcagatgaaaacggaaatgccacaattaaggtcaatgctaaagtacttgaaagtatggaaggttcaaagatccgtttaaaactcggtgacaaaaccttgattacaacagacttcaaataaatatataatagaaataagaaagatgtttgtgattgaaggagtgagtgaggatgtcaaatatagcattttatgtcgtgagtgacgtacatggttatattttcccaacagattttacgagtagaaatcagtatcagcctatgggattgttactagcgaatcatgttatagaacaagacagaaggcagtttgaccaaagttttaaaatagataatggtgattttttgcaagggtcaccattttgtaattacttaatcgatcatagcggcagtagccagcctttagttgatttttataatcgaatggcattcgactttggtacgcttggtaatcatgaatttaattatggattaccatacttaaaagacactttacgcagactcaattatccagttttgtgcgctaatatttatgaaaatgatagtacattgactgataacggtgtgcagtattttcaggttggagatcaaacggttggtgtgataggtttaacgacacaatttattccccattgggaacaaccagagcatattcagtcacttacgtttcatagtgcttttgcaacacttcaacaacacttacctgaaatgaagcgacatgcagatatcattgtggtttgttaccatggtggatttgaaaaggatttagaaagtggtacgccgaccgaagtgttaacgggtgaaaatgaaggatatgccatgttagaagcgttttctaaagatatagatatctttattacgggtcaccaacatcgacaaattgctgaaaggtttaagcaaacggctgtgattcaacctggtacgagaggtacaactgtaggcaaagttgtcttgagtactgatgaatatgaaaatgtatccgttgaatcatgtgaattacttcctgttatagatgattccacatttactattgatgaagatgaccaacatatacgaaagcagttagaggactggttagattacgaaattacaacattgccatatgatatgacgattaatcatgcatttgaggcacgtgtggcaccgcatccttttactaattttatgaattacgctttattagaaaaaagtggagcagatgttgcctgtacagctttgtttgattctgctagtggtttcaagcaagtcgtgacgatgcgagatgttattaacaattacccatttccaaatacatttaaagttttagttgtaagtggtgcagagcttaaaaatgccattgaacgatcggctgaatattttgacgtgcaagatggagaaataagtgtgagcgcagacttccttgaacctaaaccacaacactttaattatgatatatatggtggcgtaagttataccattcatgttggaagaccgaaaggagaacgcgtgagtgacatgaagataaaaggtcatccagtggatttaaagcagacatatacaatttgtgtgaataattatcgtgctgttggcggtggtcagtatgatatgtatatcgacgcaccagttgtgaaagatattcaagttgaaggcgcacaattgcttattgattttttatcaaataataatttgatgcgcatcccgcaagttgttgattttaaagttgaaaagtgacggatatatgtaaaacttacttgattttaatcgagtaagtttttgtttaaagcgagaaagtattatctttagacgacgtgattgaaatgtcacgtcctgtcaaaatgaatagtttattaaagttgtattttgatagaaatatactgacaccacaaaaattattgaattatttaaaagttgatgaaacatttttgaatcatctagcaggtattaatttaaaactctttaaggattatgttaatgaaaatagagaatataatataacgaatctatataaataaggtaccagtatttaaacctcgagctgaaaagatcatcatttcagttcgagtttttttgtgtaacatctgttgataggtatcgacaagaaccttttaatgttgtgttttgtgcgatataacaagctttttaggctattaaagaatattcagaattaaatatataattatgaataaattatgtcattgaaaaaattatgattataaaatcattctaaaaacaccgaaataacaatgatttcatgaaaacatttattttaaaatttgatatttgttcaaataatattcgaaattaaacttttttgcatagaattttctttatatcctgagagacatgtactataatgtttgtgaaataattcacaaagtataaaggagtggttgtatatgttaactatacctgaaaaagaaaatcgtggatcgaaagaacaagaagtggcaattatgattgatgctctagctgacaaagggaaaaaagcattagaaacattatctaaaaagtcacaagaagaaattgatcatattgttcatcaaatgagcttagcagctgttgatcaacatatggtgctagcaaaattagcacatgaagaaactggaagaggtatatacgaagataaagcgattaaaaatttatacgcttctgaatatatatggaattcaataaaagacaataagacagtagggattattggtgaagataaagaaaaaggattaacgtatgtagcggaaccaattggtgttatttgtggtgttacgccaacaacaaatcctacgtcgacaactatttttaaagcgatgattgcaattaagacaggaaatccaatcatttttgcattccatccaagtgcacaagaatcgtcgaagcgtgcagcagaagttgtattagaagcggcaatgaaggcaggtgcacctaaagatattattcaatggattgaagtgccttctatcgaagcaacaaaacaattaatgaatcacaaaggtattgcattagttctagcaacaggtggttcgggcatggttaagtctgcatattcaactggtaaaccggcattaggtgtgggaccaggtaacgtgccgtcttacattgaaaaaacagcacacattaagcgtgcagtaaatgatatcattggttcaaaaacatttgataatggtatgatttgtgcttctgaacaagttgtagtcattgataaagaaatttataaagacgttactaatgaatttaaagcacatcaagcatattttgttaaaaaagatgaattacaacgcttagaaaatgcaattatgaatgaacaaaaaacaggtattaagcctgatattgtcggtaaatctgcagttgaaatagctgaattagcaggtatacctgtccccgaaaatacaaaacttatcatagccgaaattagcggtgtaggttcagactatccgttatctcgtgaaaaattatctccagtattagccttagtaaaagcccaatctacaaaacaagcatttcaaatttgtgaagacacactacattttggtggattaggacacacagccgttatccatacagaagatgaaacattacaaaaagattttggactaagaatgaaagcttgtcgtgtacttgtaaatacaccatcagcggttggaggtattggtgatatgtataacgaattgattccgtctttaacattaggttgtggttcgtacggtagaaactcaatttcacataatgttagtgcgacagatttattaaacattaaaacaattgctaaacgacgtaataatactcaaattttcaaggtgcctgctcaaatttattttgaagaaaatgcaattatgagtctaacaacaatggacaagattgaaaaagtgatgattgtctgtgaccctggtatggtcgaattcggttatacaaaaacagttgagaatgtattaagacaaagaacggaacagcctcaaattaaaatatttagcgaagtcgaaccgaacccatcaactaatacagtatataaaggtctggaaatgatggttgatttccaaccggatacaatcattgcacttggtggtggttcagcgatggatgctgcaaaagcaatgtggatgttctttgaacaccctgagacatcattcttcggtgctaaacaaaagttcctagacatcggtaaacgtacttataaaataggcatgcctgaaaatgcgacgttcatttgtatccctacgacatcaggtacaggttcagaagtaacaccatttgcagttatcacagatagtgaaacaaatgtaaaatatccgttggctgattttgctttaacacctgatgttgcaattattgaccctcaatttgtgatgagtgtgccaaaaagcgttacagcagatacaggaatggatgtactaacgcatgcaatggaatcatatgtatctgtaatggcttcagattacacaagaggtttgagtctacaagcgattaaattgacgttcgaatatttaaaatcatctgttgaaaaaggtgataaagtttcaagagagaaaatgcataacgcatcaactttggctggtatggcatttgcaaatgcattcttaggcattgcacactcaattgcgcataaaattggtggcgaatatggtattccgcatggtagagcgaatgcgatattactaccgcatattatccgttataatgccaaagacccgcaaaaacatgcattattccctaaatatgagttcttcagagcagatacagattatgcagatattgccaaattcttaggattaaaaggtaatacgacagaagcactcgtagaatcattagctaaagctgtctacgaattaggtcaatcagtcggaattgaaatgaatttgaaatcacaaggtgtgtctgaagaagaattaaatgagtcaattgatagaatggcagagctcgcatttgaagatcagtgtacaactgctaatcctaaagaagcactaatcagtgaaatcaaagatatcattcaaacatcatatgattataagcaataatctatctgataataatcatctaactcacctgaaattacaaaagtaaaaaatgccacataaacttaaagtcgataatcattatacggttatcggcttttatttattgccaaatcttcagagagatacaacctagacaatcatttttttaataaagaaaatattaagattgatactcatttcacaaaatattactactttagagtataattatttttaatttcatataaataaaaatgcgaaaataatgcggtttaaaagtaattaattgtttaaatgatatgtaatatgtaaatactatatatataataccaattttaatgaaaatttttaagggaggtaaataatggaaagtacattagaattaacaaaaattaaagaagtattacaaaaaaacttgaagattttaattattttaccgctattatttttaattattagcgctattgttacatttttcgtcttatcacctaaatatcaagctaacactcaaattttagtgaatcaaactaagggtgacaatcctcagtttatggcgcaagaggttcaaagtaatattcaacttgtaaatacgtataaagaaattgttaaaagtcctagaattttagatgaggtgtcaaaggacttaaataataagtattcaccatctaaattatcgagtatgttgacaattacaaaccaagaaaatacgcaacttatcaacatccaagttaaaagtggtcataaacaagattcggaaaaaattgcgaatagcttcgctaaagttacaagtaaacaaattccgaagattatgagtgtggataacgtatcaattttatctaaagcagacggtacagcagttaaagtcgcaccaaaaactgtagtgaatctcatcggtgcattctttttaggattagttgtcgcgcttatatatatcttcttcaaagtaattttcgataagcgaattaaagatgaagaagatgtagagaaagaattaggattgcctgtattgggttcaattcaaaaatttaattaaggatggttgctacttatgtcaaaaaaggaaaatacgacaacaacactatttgtgtatgaaaaaccaaaatcaacaattagtgaaaagtttcgaggtatacgttcaaacatcatgttttcaaaagcaaatggtgaagtaaagcgcttgttggttacttctgaaaaacctggtgcaggtaaaagtacagttgtatcgaatgtagcgattacttatgcacaagcaggctataagacgttagttattgacggcgatatgcgtaagccaacacaaaactatatttttaatgagcaaaataataatggactatcaagcttaatcattggtagaacgactatgtcagaagcaattacgtcgacagaaattgataatttagatttactaacagctggtcctgtacctccaaatccatctgagttaattgggtctgaaagatttaaagagttagttgatattttcaatgagcgttatgacatcattatcgttgatacgccaccggtcaacacagtgacggatgcacaactatatgcgcgtgctattaaagatagtctgttagtaattgatagtgaaaaaaatgataaaaatgaagttaaaaaagctaaaacacttatggaaaaagcaggcagtaacattctaggcgtcattttaaataaggcaaaagtagataaatcttctagttattatcactattatggagatgaataagtatgattgatattcataaccatatattgccgaatatcgatgacggtccgacaaatgaaacagagatgctggatcttttaaaacaagcgacaacacaaggtgttacagaaattattgtaacatcacatcacttacatcctcgatataccacacctatagaaaaagtgaaatcatgtttaaaccatattgaaagcttagaggaagtacaagcactaaatctaaagttttattatggtcaggaaataagaattaccgatcaaatccttaatgatattgatcgaaaagttattaccggtattaatgattcacgttatttactaatagaatttccatcaaatgaagttccacactatactgatcaattatttttcgaattacagagtaaaggctttgtaccgattattgcacatccagagcggaataaagcaataagtcaaaaccttgacatactatacgatttaattaacaaaggtgctttaagtcaagtgacaacggcgtcattagcgggtatttccggtaaaaaaattagaaaattagcaattcaaatgattgaaaacaatctgacacatttcatcggttcagatgcgcataacacagaaatcagaccgttcttaatgaaagacttatttaatgataagaaattacgtgattattatgaagatatgaacggatttattagtaatgcgaagttagttgttgatgataaaaaaattcctaaacgaatgccacaacaagattataaacagaaaagatggtttgggttataaacagcaaatgaggggttttatggcacatttatctgtgaaattgcggcttttaatactagcattaatcgattcactgatagtgacattttcagtattcgtaagttattacattttagaaccgtatttcaaaacatattctgtcaaattattaatattggcagctatatcactattcatatcgcatcatatttcagcatttatttttaatatgtatcatcgagcgtgggaatatgccagtgtgagtgaattgattttaattgttaaagctgtgacgacatctatcgttattacgatggtggtcgtgacaattgttacaggcaatagaccgttttttagattgtatttaattacttggatgatgcacttgattttaataggtggctcaaggttattttggcgtatttatcggaaataccttggaggtaagtcatttaataagaagccaactttagttgttggtgctggtcaagcaggttcaatgctgattagacaaatgttgaaaagtgacgaaatgaaacttgaaccggtattagcagtcgatgatgacgaacataagcgcaatatcacaattactgagggtgtaaaagtccaaggcaaaattgcggatattccagaactagtgaggaaatataagattaaaaaaatcatcattgcaattccaactattggtcaagagcgtttgaaagaaattaataatatttgccatatggatggcgttgagttattgaaaatgccaaatatagaagatgtcatgtctggtgagttagaagtgaaccaactgaaaaaagttgaagtagaagatttactaggcagagatcctgttgaattagatatggatatgatatcaaatgaattgacgaataaaactattttagttacgggtgcaggtggttcaataggatcagaaatttgtagacaagtttgtaatttctatccagaacgtattattctacttggccatggtgaaaacagtatttatttaatcaatcgtgaattgcgaaatcgcttcggaaaaaatgttgatatcgttcctattatagcggatgtgcaaaatagagcgcgtatgtttgaaattatggaaatgtataaaccatacgcagtttatcatgcagcagcacacaagcacgtgccgttaatggaagacaaccctgaagaagcagtacgtaataatattttaggtacgaaaaatactgctgaagctgctaaaaatgcagaggtaaagaaattcgttatgatttctacggataaagccgttaatccgcctaatgtcatgggagcttcaaagcgaattgcagaaatgattattcaaagtttaaatgatgaaacgcatcgaacaaattttgttgcagtgagatttggtaatgtacttggatcgagaggatctgtgattccacttttcaaaagtcaaatcgaagcgggtggtccagttactgtaacgcatcctgaaatgacacgatactttatgacgattcctgaggcgtctaggttagttttgcaggcaggggcattagcagaaggtggcgaagtatttgtgttagacatgggagaaccagtgaaaattgtagatttggcacgtaatttaattaagctaagtggtaaaaaagaagacgacatacgcattacttatacagggattagacccggcgaaaaaatgtttgaagaattgatgaataaggatgaaattcacccagaacaagtatttgaaaaaatttatcgcggtaaagtacaacatatgcaatgcaatgaagttaacgcgattattcaagacatcgtcaatgattttagtaaagaaaaaattattaactatgccaatggcgaaaagggagataattatgttcgatgacaaaattttattaattactggaggcacaggatcattcggtaatgctgttatgaaacgttttttagactctaatattaaagaaatccgtattttttcacgcgatgagaaaaaacaagatgacattcgaaaaaaatataataattcaaaattaaagttctacattggtgatgtacgtgatagtcaaagtgtagaaacagcaatgcgagatgttgattacgtattccatgcagcagctttaaaacaagtaccgtcatgtgaattctttccagttgaggcagtgaagacaaatattattggtacagaaaatgtcttacaaagtgcgattcatcaaaatgttaaaaaagtcatatgtttatctacagataaggcagcgtatcctattaatgctatgggtatttcgaaagcaatgatggaaaaagtatttgtagctaaatcaagaaatattcgtagtgaacaaacgcttatttgcggtacaagatacggtaatgtgatggcttcaagaggttcagtaattcctttgtttatcgataaaatcaaagctggagaacctttaacgattacagatcctgatatgacaagatttttaatgagtttagaagatgccgtagaactagttgttcatgcatttaagcatgcagagacaggcgatattatggttcaaaaagcaccaagctccacagtaggggatcttgcgaccgcattattagaattgtttgaagctgataatgcaattgaaatcattggtacgcgacatggagagaaaaaagcagaaacgttgttgacaagagaagaatatgcacaatgtgaagatatgggtgattattttagagtgccggcagactccagagatttaaattatagtaattatgttgaaaccggtaacgaaaagattacgcaatcttatgaatataactccgataatacacatattttaacggtggaagagataaaagaaaaactactaacactggaatatgttagaaacgaattgaatgattataaagcttcaatgagataggagagagtgacgttgaatattgtaattacaggggcacatggttttgtaggaaaaaacttgaaagcagatttaacatcaacgacagatcatcatattttcgaagtacatcgacaaactaaagaggaagtattagagtcaacattgttgaaagcagactttgtcgtacatttagcaggtgttaatcgacctgaacaccacaaagaattcagcttaggaaatgtgagttatttagatcatgtacttgatatattaactagaaatacgaagaagccagcgatattattatcgtcttcaatacaagcaacacaagataatccttatggtgagagtaagttgcaaggtgaacagctattaagacaatatgccgaagagtatggcaatacggtttatatttatcgctggccaaatttattcggcaagtggtgtaagccgaattataactcagtgatagcaacattttgttacaaaattgcacgtaacgaagagattcaagttaataatcgggacgttgaactaacactaaactacgtggatgatatcgtcgctgaaataaaacgtgctattgaaggaaatccaacgattgaaaatggtgtacctacagtaccaaatgtatttaaagtgacattgggagaaattgtagattcattatacaagttcaaacagtcacgtctcgatcgaacattgccgaaattagataacttatttgaaaaagatttgtatagtacgtatttaagctatctacctagtacagactttagttatcccttacttatgaatgtggatgataggggttcttttacagaatttataaaaacaccggatcgtggtcaagtttctgtaaatatttctaagccaggtattactaaaggtaatcactggcatcatactaaaaacgaaaaatttctagtcgtatcaggtaaaggggtaattcgttttagacatgttaatgatgatgaaatcattgaatattacgtttctggcgacaaattagaagttgtagacataccagtaggatacacacataatattgaaaatttaggcgacacagatatggtaactattatgtgggtgaatgaaatgtttgatccaaatcagccagatacgtatttcttggaggtatagcgcatggaaaaactaaaattaatgacaatagttggtacaaggcctgaaatcattcgtttatcatcaacgattaaagcatgtgatcaatattttaatcagatattagtacacactggtcaaaattatgattatacattgaatcaaattttctttgatgatttggaattaagacaaccggaccactacttagaggctgttggaagtaacctcggagaaacgatggggaatattattgcgaagacgtatgacgttttattacgcgaacaaccggatgcacttttaattcttggtgatacaaatagttgtttagcagcagtatctgctaaacgattaaagattcctgtgtttcatatggaagcgggtaatagatgctttgatcagaatgtacctgaagaaatcaatcgtaaaattgttgaccatgtcagtgatgtgaatctaccttatacggaacatagcagacggtatttattagatgaaggcttcaataaagcgaatatctttgtgacaggatcaccgatgacagaagtgatagaagcgcatcgagataaaattaatcacagtgacgttttaaataaactaggattagaaccgcaacaatacattttagtatctgcgcatagagaagagaatatcgataatgaaaagaattttaaatcattaatgaatgcgataaatgatattgccaaaaagtataaaatgcctgtgatttattcaacgcatccaagaagttggaagaaaattgaagaaagtaaatttgaatttgatccattagttaaacagttaaagccatttggtttctttgattataatgcattgcaaaaagatgcatttgttgtgctatcagatagtggaacattgtcagaagagtcgtctattttgaagttccctggtgtccttattcgaacttccacagaaagaccggaagtactagataaaggtacggttattgtaggtggtattacctataacaatctaatccaatccgttgaactagcaagagagatgcaaaacaataacgaaccgatgattgatgctattgattataaagacactaacgtttcgacaaaggtagttaaaattattcaaagctataaagatattatcaatcgaaatacttggaggaaatgacgatgaggatagcgattcttggcgctacaaacattaagcatatgtcattattatcacattatttaaaccatattgatttgaacattaatgaagtggacattatatatactgacaaatatgatatcgaagaacatatccaaggcattaataattactataaatatagagtagatattaaagaagattggtcttttatcaaaaaagctattgcttactatcgatttagaccatatgccaagaaaattcttgaagaaaatcattatgattttgtcatagtatggggaagttacacaggccacttatttaaaaggtttctagaaagaagctacaaagataaatttattttaaatatcagagattatttttttgaaaataataaacttattaagtatagaatgaaaaagattgttgatgccagcaggctaacaacattatcttcagaaggttttcttaaatttttacctaaatctgaaaaatatagaattatttatagttataacatgaatattattagagaaagtaatgtgagcgaagaattcaaaaaacgatggccaattaatataggttttataggcaatgttagatttaacgagataaatcaaaagttgataaaggaactggcaaatgattcaaggttccatatgcaatattttggaacagggtctgaagaattagaagcctttgcacgagaaaattatattaataatgtaacgttttctggtgggtttgatttgaaagaaacaccgaaatatttaaatgaaattgatatacttaataatttgtttggtaatcaaaatattgctttagatactgctttatccataagaatgtattatgcgttgtttttaaataaacctattattacaacagatgatacattcaccgctacagaagctaataaattcggactgggttttagtattaatccagaaaatttaaaaggtattggtgatgaattgatggattggtataacaatttggatgtaattgacattaatcataaaagagaagcttatagaaatgatgtaattggaaataataaacagttctatcaagagataggcaggatatttaatgagtaagatatacaatgtcacttcatatgttatcgccattttaatgtttccttgccttatgttaggtgataaacctttattatttttagcacctataagttatggagtaggaaagctctttataagcttctcgaataatccgaattttaaattttcgaaaattgtatacgatgttttaggttttcttagattagtatttatacctgctatgatagtgtttttccaggattcaactatagataatttaccattaggacaagcttattttaatcaagcagttatttatatgagtgtagagtttatcataggctcactatttatattaatactatctaaattattcaaacatgaagtgatatcaagaagtagctttacactttctggttcatcaatttattacattgtgtttggtcttgttatttgtgggatttttgtagcttttcctgaagtgcgtaaaaatatatcatttttaattattaaaacagatgcaatgggaagaggaaccgaagtaacaagtggtttaaatgtcctttttgtaatgctgtttcaacttgccttagcattattattcttaataatcgcatatgcttcatataaaaagtataaagagaatcctaaaattatttatgttgtaatgccgctagctatagggattttaaatattagtttaattgttggtgaaagaagaagttaccaactttatacgatggttgctgttttaacagtggtgtcactcttgttttctaagcacaaaagacgtatcaatatcgttattatttctgttggaattttcgtattagcattgatgacactatataaagaattgtatgtgtttaattatagttcatatagcgaggcgttaaatagtacaagtgtaagtaatcttaaaatagttgacacgttgcaatcatatttttatggacctagcaatattgcagcttctatagactatttgaattactataatggttcgttcaaacaatatttatttgataataccagagctgtttttggctttaatttcttcttagataaaaagcagttgattactagccaactttttaaccaattgatatatggtagtaaacaattgactggtcatcttatttcgagtgctggatatggaattatttattttggacccttattcttctatttgaatttaattgcaaatatcttttttgcatttctgagtgagtatattattcggaagagtcattcgttagaagtgatatttattggtacatatatttatatgagacttattacgagtatttttagtcacccgacaccattaatcacattgatttctatgattttagttgtatatgttatagctattatcccaggcattataataaaaaaatttactaaaaaagtagggatagaatgattgtaaaaacatttatgaaatcgaaaatatttagattaatgaatacaccactattattattttataagaaagaatatttaactggatattattttgaaaataaagtggctggatggttatgggcgtggaaagctgttccgttcaagctgttaggaataaatacgagcttgccatttcctgcagatataactgttagaatgcataaccctaataacattgtttttgataaaaatgatattcatattttccaatcgcccgggacgtattttaataatttttcagcagttatatatataggtagaggtgtttatatagcgccaaacgtaggtattattacagctaatcataatattaaaaatttgaagtcacatgcaccaggtgaagatgtcaaaatagggaattatagttggattggaatgaactcagttatattaccaggagtagaattgggggaacatacaattgtaggggctgggtcagttgtaacaaaaagttttccagaaggtaacgttgttataggtggcaatccagcgaaagtcatcaagaaaatctgaggttgattatgagattaaataaatttattggcgattcgttcttaatgattttaagtagtggcatcgctcaagtcatattaatcatcactaccccaattattacaagactatattcacctgcagaatttggtgagtttacaattttttcaaatatcgcaatgattttaataccaataataaatgcgagatacgatttattgattgtgaatgccaaaaatgaccgtagtgctaatatactttcacaaatcagttttttgatatcattgcttattttattaatactgataccaatacttgccattagtgcatggttgtacccaaactttatattagattttattttcattattattatgttgtttttggtaagtttaacaaacatatttacaaattatctaaataaggaacggaaatataaagtgttaagtttgatcaatgtgtttagagctggatcaatggctttacttcaaatcattttcggacttttatcattaggaagtctaggattaattattggtttttcattatcctatatcacaggcattacactaggatataaaacgtttaaaaagcactttaatattgtgagaaataaggaagaaactaaagcattatttttagaaaataaaaatcagttagtttattcaacaccatcaatattattaaatagtttgtctttctcagttgttgtgttctttataggtattttgtataccaatacagaagtaggtatttatggtatggctataagagtattaggtataccagtgacaattatttcactagggttatcaaaaatatttatgcaacaagctaatgactattatattgaacgtggtaacttccgaaatttattacttaaatttagttccacactagttatcgtttcgataattctttatgtgccactttatttatttagtgaagaattagtcaatatattattaggacacagttgggttgacgcaattacagttataaaaattgttatcccattatttgttataaggctgattgtatcaacggtatcactttctgtgattgtattacaaaaacaacagttagaattaatactacaagcgttatttttaataggtactactgtaacatttgttatatcaaaaatgcttaatctaacttttttaaactttgtatctattaatacagctgttttaatcgtatcttacatgatatttttcatagcactctattattttgctaaaaataaacagttcaaaaattcttagtctaaattcattaataaaaaggacgtcgattagatgagtgaaaaaaagattttgattttatgtcagtatttttatccggaatatgtatcttctgcgacgttaccaactcaattggcggaagatttaattgcgaatcacattaatgtcgatgtcatgtgtggatggccatatgaatatagtaatcatcgagatatatctaaaaccgagatgcatcgtggtattcgcattcgacgtctcaagtattcgagatttaataacaaaagtaaggttggaaggatcatcaatttctttagtttattttcaaaattcgtgattaatatacctaaaatgttgaaatatgatcagattcttgtttactctaatccaccaatcttgccattaataccagacgtactacacagactgcttaagaaaaaatattcttttgtggtgtatgatatagcacctgataatgcgattaagacaggtgcaacacgtccaggtagcatgattgataaactgatgcgttacattaatagacatgtctataagaatgctgaaaatgtcatagtccttggtacggaaatgaaaaactacttactaaatcatcaaatttctaaaaatgctgacaatatccatgtgattcctaactggtatgacatgcgtcagttacaagacaatcatatctataatgacacatttaaagcttaccgtgagcaatacgacaaaattttattgtatagcggtaatatggggcagttacaggatatggagacacttatttcatttttaaaattaaataaggatcagcctcaaacgttaacaatactttgtggtcatggtaagaaatttgcagatgtcaaaacggcaatagaagaccatcgtattgaaaatgttaaaatgtttgagtttttaacaggtacagactatgctgacgtattaaaaattgcggatgtatgtattgcatcgctgattaaagaaggcgtcggtttaggcgtgccgagcaagaattatggctaccttgcagctaagaagccgttggtactcatcatggataagcaatctgatatcgttcaacatgttgaacaatatgatgcgggtatccaaattgataatggcgatgaacatgccatttataacttcatcaacactcactcgagtaaggaattgcacgagatgggtgagcgcgcacatcaactgtttaaagataaatatacgagagaaattaatactataaagtattacaatctgttgaagtgaggagataattatgaagcgattattcgatgtagtgagttcaatatatggtttagtagttttaagtccgattctgttaattacagcattactaattaaaatggaatcacctggaccagccattttcaaacaaaaaagaccgacgattaataatgaattgtttaatatttataagtttagatcaatgaaaatagacacacctaatgttgcaactgatttaatggattcaacatcgtatataacaaagacagggaaggtcattcgtaagacctctattgatgaattgccacaattattgaatgttttaaaaggagaaatgtcaattgtaggtcctagaccagcgctttataatcaatacgaattaatcgaaaaacgtacaaaagcgaacgtgcatacgattagaccaggtgtgacaggactagctcaagtgatggggagagatgatattactgatgatcaaaaagtagcgtatgatcattattacttaacacatcaatctatgatgcttgatatgtatatcatttataaaacggttaaaaatattattacttcagaaggtgtgcatcactaatgagaaaaaatattttaattacaggcgtacatggatatatcggtaatgctttaaaagataagcttattgaacaaggacatcaagtggatcaaattaatgttaggaatcaattgtggaagtcgacctcgttcaaagattatgatgttttaatccatacagcagctttggttcacaacaattcacctcaagcaaggctaactgattatatgcaagtgaatatgttgcttacgaaacaattggcacaaaaggctaaagctgaagacgttaaacaatttatttttatgagtactatggcagtttatggaaaagaaggtcaggttggtaaatcagatcaaattgatacacaaacaccaatgaaccctacgaccaattatggtatttccaaaaagttcgctgaacaagcattacaagagttgattagtgattcgtttaaagtagcaattgtgagaccaccaatgatttatggtgcacattgcccaggaaatttccaacggttaatgcaattgtcaaagcgattgccaatcattcctgttattaaaaatcagcgcagtgctttatatattaaacatctgacagcatttattgatcaattaatatcattagaagtgacaggagtatatcatcctcaagatagtttttactttgatacatcgtcagtaatgtatgaaatacgtcgccaatcacatcgtaaaacggtattgatcaacatgccttcaatgctaaataagtattttaataagttgtcggtctttagaaaattattcggcaatttaacatacagcaatacgttatatgaaaaaaataatgcacttgaagttattcctggaaaaatgtcacttgttattgcggacatcatggatgaaacgacaaccaaagataaggcataagtcatctattaaataaaatcaacatacaaatcgtttttatttggaggttatagtatgaagttaacagtagttggcttaggttatattggtttaccaacatcaattatgtttgcaaagcatggcgtcgatgtgcttggtgttgatattaatcagcaaacgattgataagttacaaagtggtcaaattagtattgaagaacctggattacaagaggtttatgaagaggtactgtcatcgggaaaattgaaggtatctacaacgccagaagcatctgatgtttttatcattgccgttccgacgccgaataatgatgatcagtaccggtcatgtgacatttcgctagttatgcgtgcattagatagtattttaccatttttagaaaaaggaaataccattattgtagagtcgacaattgcgcctaaaacgatggatgattttgtaaaaccagtcattgaaaatttagggtttacaataggtgaagatatttatttagtgcattgtccagaacgtgtactgccaggaaaaattttagaagaattagttcataacaatcgcatcattggcggtgtgactaaagcttgtattgaagcgggtaaatatgtctatcgcacatttgttcagggagaaatgattgaaacagatgcacgtactgctgaaatgagtaagctaatggaaaacacatatagagacgtgaatattgctttagctaatgaattaacaaaaatttgcaataacttaaatattaatgtattagttgtgattgaaatggcaaacaaacatccgcgtgttaatatccatcaacctggtccaggagtaggcggtcattgtttagctgttgatccgtactttattattgctaaagaccctgaaaatgcaaagttaattcaaactggacgtgaaattaataattcaatgccggcctatgttgttgatacaacgaagcaaatcatcaaagcgttgagtgggaataaagtcacagtatttggtttaacttataaaggtgatgttgatgatataagagaatcaccagcatttgatatttatgagctattaaatcaagaaccagacatagaagtatgtgcttatgatccacatgttgaattagattttgtggaacatgatatgtcacatgctgtcaaagacgcatcgctagtattgattttaagtgaccactcagaatttaaaaatttatcggacagtcattttgataaaatgaagcataaagtgatttttgatacaaaaaatgttgtgaaatcatcatttgaagatgtatcgtattataattatggcactatatttaattttatcgacaaataaaatgtgtcaaactagggcatacatgattaagaaaagataagctgtcatgtgtttgaacttcagagaggataatgttatgaaaaaaattatggttattttcggtacgagacccgaagcaataaaaatggcaccattagtaaaagaaattgatcataatgggaactttgaagcgaacattgtgattacagcacaacatagagatatgttagatagtgtgttaagtatatttgatattcaagctgatcatgatttaaatattatgcaagatcaacaaacgttagcgggccttacggcgaatgcgcttgcaaaacttgatagcatcattaatgaggaacagccggatatgattttagtacatggtgatactacaacgacttttgtaggaagtttggcagcattttatcatcaaattccggtcggacatgtagaagctggacttcgaacacatcagaaatactcaccatttcctgaagagttaaatcgagtcatggtaagtaatattgctgaattgaattttgcgccaacagtaattgcagctaaaaatttactttttgaaaacaaagacaaagagagtatctttattaccggaaatacagttattgacgcattgtcaacaacagttcaaaatgattttgtttcaacgatcattaataaacataaaggcaagaaagttattttactaacagcgcatcgtcgtgaaaatattggggaaccgatgcatcagatttttaaagcagttagagatttggcagatgaatataaagatgttgtcttcatttatccaatgcatcgtaatccaaaggtaagagcgattgccgaaaaatatttatctgggagaaatcggattgaattaattgagccattagatgcgattgagttccataattttacaaatcaatcgtacctcgtactgacagattctggtggtattcaagaggaagctcctacatttggaaaacctgtgttggtattaaggaatcatacagagcgtcctgaaggcgttgaggcgggaacatcgagagtaattggcacagattatgacaatattgttcgaaatgtgaaacaattgattgaggatgatgaagcgtatcaacgtatgagtcaagcgaataatccatatggtgatggacaagcatcacgacgtatttgtgaagcaatagaatattattttggattgcgttcagacaagccggatgaattcgtacctttacgtcataaataataaaaaacccctaatcatgaagttggtttagacaaccagcggtgactaggggtttttaatatgtttatttttgatagtggtagccaatatcatatttgaatactttatttgataatattggactttgctgtccatcgtcatcactttttaaacgtacatttttatgagcttctttaaatacatcggaattcaaccaattattaaagctatcttcagattcccaaatagttaagattttaacttcatctgtatccttggtatttaatgttttagtgacaaacatttgttggaagccttcaatagtttcaataccttgtctattgtaaaaacgttcaatcgtttcttccgcactgcctttttgtaattgtaatctattttctgccatgaacatgggcaatcactcctctattttattatttgatttgggtaatgtttttacaaatgtaaagagtacagcggtttgtatgataaccattatgattaatcctacacggactgcaagaacatccaccatataaattgaaaaacctattacaatgtataagctaattaaaattttaattttctgttgtagcgtgtagccgcgatgtaaataaaagttttctacatattctttataaattttttgattaataagccaattgtaaaagcgatctgaacttcgagcaaaacaaaaaactgctacgagtaaaaaaggggtcgttggcagtaaaggtaatacggcacctgcaataccaagcgctgtaaatattaagccaatgacgattaaaataagtcgcattgaaaaaactccattctagtactaatgcgcatgtaatattgttttagtaatataactcatgctaaatataatgtgtatgataagtgcaatgactcagtaaaatgaaacgttgttgaattatccttgtcccattaacgcattttaagcgcgactttcataacaagcaaactatttaatgagaattattctcaagtattatagttatattatgtgttttatttttgaaaagtgcaatatgttttcgaaaataagattatttttatgtgcaaaaacgacgcaaaagttttaaaaatgagacttctgtgagctgattattttataaaatgtaaacgcttactatataatgtgaatcatatcgtttaaaagcattattaaatatgatgctaagagatttatattatagccaataaacaaaggagagataatatggcagtaaacgttcgagattatatagcagagaattatggtttatttatcaatggggaatttgttaaaggtagcagtgacgaaacaatcgaagtgactaatccagcaactggagaaacactatcacatattacaagagcaaaagataaagatgtcgatcatgcagtcgaagtggcgcaagaggcatttgaatcatggtcattaacttctaaatcagaacgtgcacaaatgttgcgtgatattggtgataaattaatggcacaaaaagataaaattgcaatgattgaaacattaaataatggtaaaccgattcgtgagacaacagcaattgatattccatttgctgcaagacatttccattatttcgcaagtgttattgaaacagaagaaggtacagtgaatgatatcgataaagacacaatgagtatcgtacgacatgagccgattggcgtcgtaggtgctgttgttgcttggaacttcccaatgctattagctgcatggaagattgcgccagccattgctgcaggtaatacaattgtgattcaaccttcgtcttcaacaccattaagtttattggaagttgctaaaattttccaagaggtattacctaaaggtgttgtcaatatactaactggtaaaggttcagaatcaggtaatgcaattttcaatcatgatggtgtagataaattatcatttacgggctcaactgatgtaggttatcaagttgccgaagctgcagcgaaacatctagtacctgctactttagagcttggtggtaaaagtgccaatatcatattagatgatgctaatttagaccttgcagttgaaggtattcagttaggtattttattcaaccaaggtgaagtatgtagtgcaggttctcgattattagttcatgaaaaaatttatgatcaattgttgccacgtttacaagaggcattttcaaatattaaagttggagatccacaagatgaagctacacaaatgggtagtcaaactggtaaggatcaattagataaaattcaatcatatattgatgcagcaaaagaatcagatgcacaaattttagcaggtggtcatcgtttaactgaaaatggtttagataaaggattcttctttgaaccgacattaattgctgtgccagataatcatcataaattagcgcaagaagaaatatttggaccagtgttaacagtgattaaagtgaaggacgatcaagaagcaattgatatagctaatgattcagagtatggtttagctggcggcgtattttctcaaaatatcacacgtgcattaaatattgctaaagctgttcgtacaggacgtatttggattaacacttacaaccaagtaccagaaggcgcaccatttggtggttataaaaaatcaggtatcggtcgagaaacttataaaggtgcgttaagtaactatcaacaagttaaaaatatttatattgatacaagcaatgctttaaaaggtttgtactagaataaatatcgtttctgaagcgtgtttgtatgcagtctagcggtaagtcttagcatgtttacggcgttgtttagattttaagcgaaacaaaatatttaggaacatgcataatgatattaggatataatgactaaaataatagcagtaggatggtttttaattgcaaatcatcttactgctgtttttaattatgctaatttgcgatgtggctattataaggacagagttgtttatgaattatggtgatttagaaatatgaagttcaatgtgataagtcatcgtttgttttaatatgtggaacaatcattaaagctattgttatttttggacttgatgaaataaaacaaatgaatttgagaaacttttttgtcatttttatgtaactaacacaataatctcgtacattattaaaaatttctatatgatagggataaagcaaagcgcgagtgtgctgtaaaagtttttccaagctgatattacataaaggtataaagggtaaagattaatgagttgtcatgtaaagaacgatgatgtataaatcatggttaattacggaagcattaatattaacctgagaagctataaagaattatttttaaaagagacaatattaaatacgacgcatttatttaggagtggcaaactatgaacgggaaaaaggcgaatacgataaacagatacaaatattttcatcatgtcgatcatcaaaaaattcaacaaagttctaaaaagacgctatgggcatcacttatcatcacactattatttacagtgattgaatttgttggaggtttagtatctaattcattagcattgctgtcagactcatttcatatgcttagtgatgtattagcactcggtttgtcaatgttggcaatttattttgcaagtaagaagccgactgcacgatacacatttggatatttaagatttgagatattagctgcatttttaaatggtttagcattaattgtaatttcaatctggattttatatgaagctattgtacgtattatttatccgcaacccattgaaagtggcattatgtttatgattgctagtattggtttactcgtcaatattattttgactgttatacttgtaaggtctttaaaacaagaagacaatatcaatattcaaagtgcattatggcatttcatgggagacttattgaactcaattggtgtcatcgttgcagttgtattgatttactttacagggtggcgcatcatcgacccaatcattagtattgtaatttcactcatcattttacgtggtggttataaaattacgcgtaatgcgtggttaattttaatggaaagtgtgcctcaacatttggatactgatcaaattatggcagatataaaaaacatagatggcatattagatgtacatgaatttcatttgtggagtattacaacagaacattactcattaagtgcccatgttgtgttagataaaaaatatgagggcgatgattatcaagcgattgatcaagtatcatcattgttgaaagaaaaatatggcattgcacattcaacgttgcaaattgaaaacttacaattgaatccattagatgagccatacttcgacaaattaacataaataaaacattgttgcgcctaaaacattaatctatgtcataggcgcacgtttcgttttatacttatgttgcatcatctaaatgattttcgtcgatgtctttgatggtatctacatctaacacgacatctttaggtttcaaaatatgaatatgtttttcatcatttgtatgtaaaatgcgttctatgatgtacctttgaccggtcattgtttctacagcaatctttttgtttcttgctaaacttgctacgacagattctttatccataatgatagcctcctatatatatctttatttacttataccctaacattatttttatactctttgaaaatatattttgcagaattttatctaaatatttaaaaaaatcgctcaatatccttgtaatccgataagaattatagtaatatttttttcaaccattgttataggaggtcttattaatgacattatttttattagaagctaacaatcttgattttgcatcaacgaaagaagaactagaagcaaaggcatcatcactatctacgaagacaattccaacattaattgaagtacaagctactgaaaatttaactcatggctattttattgtggaagcaaatgacgaagcagaagctaaacaatttttaacagaagcaggtattagcattcaattagtcaaagaggtacgcttagttggtaaagatttagatgaagtaaaaaatggtgatgcacatgttgattaccttgtaacttggaacattccggaaggcattacgatggatcaatatttagcacgtaaaaagaaaaattctgttcattatgaagaagtgccagaagttgaatttaaacgcacatatgtatgtgaagatatgtctaaatgtatttgtttatacaacgcacctgatgaagaagcggtacgtcgcgcgcgcaaagcagttgatacaccgattgatggcatcgaaaaactttaataagacaacaagttgatgagatatatgtatataggtttggcgtggatttcgattgcagttaattagaatagctcaatgctataaatgtaagtagttgatatgacgaaactaatgaactaaatgcaagttttgtctaaaataatcattttattgaaatttagtagagctgaaattaatataacgtcgttaattgaataacgtttatgttataagagggttcgcaccaagccataatcatctatagatataacaattcacgatataagggctgtgtttggcatagccctttagatatacatttaattcttattaaaatggtagggattaaaagggggcttgtcatgattaaaatacaacaattacaacatcactttggatcacataaagtaattcataactttaatttggacattagcaagggagaaatagtcacttttatagggaaaagtggttgcgggaagtctactttactcaatatcatcggtggatttattcatccatcatctggtcgtgtcattattgataacgaaattaaacaacagccatctccagattgtttaatgctatttcaacatcataatctgctgccatggaaaacgattaatgacaacattaggattggattccaacagaaaattagtgatgaagagattaacgcacagcttaaattagttgatttagaaggcagaggaaagcattttcccgagcaattgtccggtggtatgaaacaacgtgtagcattatgtcgagcgcatgtgcataagcctaacgttatattgatggatgagccattaggtgcattagatgcatttacacgctataaacttcaggatcaactagtacaactaaaacacaaaacggaatcaactattatcttagtcactcacgatattgatgaagctatttatctttccgaccgcattgttctgttaggtgaagggtgcaatattatttctcaatatgaaattacagcatcacatccacgcagtcgtaatgatagccacctacttaagattcgtaatgaaattatggaaacatttgcattgaatcatcatcaagttgaacctgaatattatttataaggagtgagtgacgatgaaaaggttaagcataatcgtcatcattggaatctttataattacaggatgtgattggcaaaggacgtctaaagaaccgtctaataatgcccaacatcagcaagtgattaaaattggatatttgccgattacacattcagctaatttgatgatgactaaaaaattattatcacaacacaatcatccgaaatataaattagaattagttaaattcaataattggccagatttaatggacgcattaaacagtggtcgtattgatggtgcatcaactttaatagagctcgcgatgaaatcaaagcagaagggctcgaatataaaagctgtggcattgggtcatcatgaaggcaatgtcattatgggacaaaaaggtatgcacttaaatgaatttaataataatggcgatgattaccattttggtataccgcatcgttattcaacacattatctcttacttgaagcattacgagaacaattaaagattaaaccggggcattttagctatcatgaaatgtcgccagcagaaatgccagccgcattaagtgaacacagaattacagggtattctgtagccgaaccattcggtgcactgggtgaaaagttaggcaaaggtaagactttgaaacatggtgatgacgttatacctgatgcgtattgctgtgtgctagtactgagaggcgaattgcttgatcaacacaaggatgtagcgcaagcatttgtacaagattataaaaagtctggctttaaaatgaatgatcgcaagcaaagtgtagacattatgacgcatcattttaaacaaagtcgtgacgttttaacacagtcagcggcatggacatcctatggtgatttaacaattaagccatccggctatcaagaaattacgacattggtaaaacaacatcatttgtttaatccacctgcatatgatgactttgttgaaccgtcattgtataaggaggcatcacgttcatgacacgtctcacaattaataaaattatattacctattatcacatttattattttcttaggcatttgggaaatggtcattattattgggcattaccaacctgtattgttacctggtcctgctcttgtaggaaaaagtatatggactttcattgttactggagaaattttccaacatttagcaattagtttatggagatttgtagcgggctttgttgtcgcattgttggttgctattccattgggcttcttgcttggaaggaatcgttggctatacaacgctatcgaaccgctatttcaattgattaggccgatatctccgatagcttgggcaccatttgttgttctatggtttggtattggtagtttgccagcgattgcgattatttttatcgctgcttttttcccaattgcgttcaataccattaaaggcgttagagacattgaacctcaatatttaaaaatagcggcaaatttaaatttaactgggtggtcattgtatcgcaatatattatttcccggggcatttaaacaaatcatggctgggatacatatggcggtaggaacgagttggatatttttagtttctggtgaaatgattggtgcacagtcggggttaggttttttaatcgttgatgcacgaaatatgttgaacttagaagatgttttagcagcaatattctttatcggattatttggttttattattgatcgattcattagttatattgagcagtttatacttagaagatttggtgaataaggagagatgatgatgactttagaaacgcttatcaaagaacaattagatcctcatttagtagaagttgatgaagggacgtattatccgagaacatttatccaacaattatttgtagatggctattttggtgaagcgacactgagaaaaaatgctgaagtaatcgaagctgtatcgcagtcttgtttgacaacaggattttgtttatggtgccaattggctttttcaacgtatttagaaaatgccacacagacacatttaaataatgacttacaacagcaattgttatctggagaaatattaggtgctaccggattgtctaatccgatgaagtcatttaatgatttagaaaagttgaaccttgaacacacttatgttgatggacaattggttgtcagtggacgtatgccagctgtaagtaatattcaagaagaccattattttggtgcgatttcgaagcatgaatcatcagatgaatttgtcatgttcattctacgtgctaatcaagatggtatcactcttgttgaaaaaacaaactttttaggggtaaatggctcagcaacgtatcaaattactttgaatcaggtcgtagtgccacaatcacaaattatcacgcatgatgcgaagcagtttgcggcaactattcgcccgcaatttattgcttaccaaattccaataggattaggctcaattaaaagttctttagagttaattgatgcattttcaaatgcgcaaaacggaataaatcaatatttagagtatgatgttgaagcttttaaaaaacgttatcgtcaacttagagaggaatattatgcaatattagatgacggtaacttaacttcacatttaaatgaattaatatcattgaagaaggatatcggctatttattgttagatgtgaatcaagcttctgttgtcaatggtggctcaagagcatatacaccatattcaccacaagtacataaattaaaagaaggctttttctttgctgcattaacgccgacattaagacatttaggtaaacttgaggcagagttgcatagttaaatgaattaagatggtgcataattctattcatcgaaaactactaccgttttatagatggtagtagttttttagtgcgattacgcatattgattagttcgttatagtgagcatccgcaacatttacgcacatatgtgttcacttacgcaaatgttgataaatttcactcaattggaataatatatagtcatatagtgctgattttttttgagacattatatgcaagatgcattttaaagtcgatgcaattatttattaaataaatttgccataactaaaaattctttgcttcaacatatgatcaaataatagattttatataaatggtagtgtgcatatgtgcggataggggtgtagttatcaatgaaacgtttaagtacgactttgaaagtacgattgattagcaattttttacagttaattattacgacagcatttataccgtttatagcactatatttaacagatatgttaagtcaatcaatagtcggtatataccttgttggtttagtgattctaaaatttccattgtctattatatctggttaccttattgagatatttccgaaaaagttgctagtacttatttatcaagcgacgatggtgataatgcttgtgttcatgggcatatttgggtcacatcaattgtggcaaattattggtttttgtgttgcatatgccatatttacaatcgtttggggattacaatttccagttatggacacattaattatggatgcaattaccgaagacgtggaacattatatatacaagattagctattggatgacgaacttatcggtagctattggagcattgttaggtggcttgatgtatggctacagtatgttactgcttttcttaatagccgcttgtatatttttaattgtactgtttattttatatatttggttaccccaagaccgaaatcaagtaaagcaaagtgatgacaagaaacatgcaagtcgttatcaaaaattacaaataatgaatatatttcgcagttataaattagttttgaaagaccgtaattatatgttattgatttcggggttcagtatcatcatgatgggtgaattttcaatttcctcatatattgctattagactaaaggatcagtttgaaacaataagtataggttcatatgatattacaggagctaagatgttagcaatcttgctaatgattaatacggtcgtcgtcattttactcacgtattcaatctcgaaagttgtattgaaaatagattttaaaaaagctttaatcactggtttgctgatttatattgttggctatagtggtctaacctatcttaatcagtttggcttattagttgtttttatgataattgcgactgtaggtgaaattatttattcgcctatagtttcagaacaacgttttaaaattattcctaaagctaaaagaggaacatatagtgcagttaatgcattaggcattcatttttcagaaacactagctaggttagggattgtgttgggtgctttcttaacgacattacaaatgggactgtatatgtttatagttttaacaattggtgctagcatgcttgttgctggtgtattcggggggcaaaaacaagttaatacaaattgaatttatttaaatatttattctatgcatctttttatgttgaaaacctattaatttggtcgtaattaaaatagagataaatttattaagaatttgttaaaatttaatgataacaattgttttatgcgagttgtttgtttaatataaacttgcttcatggatattttgtaacaactgtactgaagttaatgaatgatatgaacaaatgatagttatgagtgaaaaacaaagtgttatttatcaaaatgtatgcaaattacatttaaaacgtttgatgattgatacaagatgtattttagggtaaaaatatatcgctattaacctggtgttacaaatgatatttcgtcataatcatcttctaacgagataagtagtactatcattcattatcatatcatcatgcaatttcagtaagtaatgagtattatgatatgaaagaaggactttttatgattatgggtaatttgagatttcaacaggaatattttcgtatatacaaaaataatacagaatcaacgacacaccgtaatgcgtattgggttaaactcgctaaaaatgttgaagctactaaaatgatgtatgcattatcgacaattgtgcaacaacatgcatctataagacatttttttgatgttactaccgatgacaatttaacaatgatacttcatgaatttctgccttttattgagataaaacaagttccatcttcttctgtaaactatgatttaaaagctttttttaagcaagaattaagtacttaccattttaacgattcacctttattcaaatttaaattgtttcagttcgctgatgctgcatatatactattagattttcatgtgtccattttcgatgatagtcaaattgatatttttcttgatgatttatgcaatgcatatcgtggcaatactgttattaataatactcgacagcatgcacatttaaatagaaatgatgataaagacaatcaagatgcatcgcatatagcattagactcaaactactttcggttagagaataactctgacatccatattgatagttatttaccaattaagcatccatttgagcaagctttatatcaaacgtatttgattgatgatatgacatcaatagatttgccatcgttggctgttagtgtgtatttagctaaccatataatgagtcaacaacatgatgtcacattaggtatacatgtaccatcacatttaccaaatgatttacacggaaatattgtgccattaacgttaacaatcgatgcaaaagatgtatgtcaacgttttacaacagattttaataaaagtgtgttgcaaaatatgtcgcaattacagtgcgcgaagtcttcgctttcattagagactatttttcattgttatcatcaaatgatgtcttgttgtaatgatgttattgaggatgtacatcaaatacatgatgcacatacatctttagcggatattgaaatttttccacatcaacacgggttcaaaattatatataacagtgcagcatatgatttgctctcaatcgagaccctgagtgacttagttcaaaatatttatttgcaaattactgaagaaaatggaaataaacgaacaaccgtagatgaacttaatttgatgacagaaagtgatattcaattatatgacgatatcaatttaagtttgcctgagatagatgatgcgcaaacagttgttaccttatttgagcaacaagttgaagcaacgccgaatcatgtcgctgtgcaatttgacggagtgtttataacatatcaaacattgaatgcacgcgcgaatgatttagcacaccgtttgagaaaccagtacggtgttgaacctaatgatcgtgtcgctgtcatagctgaaaaaagtattgagatgataatagcgatgataggtgtgttgaaagctggtggggcttacgtgccaattgatacgaactatccaagtgatcgtcaggagtacattttaaaagatgcaacgcctaaagttgtaatcacatatcaagtagcatacaacaataatgatgactgtatcccacactttgagttggacgcgatcgtgtgggaagaagttgataatctttctaaatgtaacacgttagaagatcatgcttatgttatttacacgtcggggacaactggtaaccctaaagggacactaattccgcaccgaggtattgttcgcttggtccatcaaaatcattatgtaccattaaatgaagagacgacgattttgttatcaggaactatagcctttgatgctgcaacatttgaaatatacggtgcattgctcaatggtggaaaactgattgttgctaaaaaagaacaattattaaatccaatagcgttagaacaattaatcaatgaaaatgccgttaatactatgtggttaacctcctcattatttaatcagattgctagtgaacgaatagaagtattggtaccgttaaagtatttattaattggtggagaagtattgaatgctaagtgggtggatttgcttaatcaaagaccgaagcatcctcaaattattaatggttatggaccaactgaaaatacaacatttacaacgacgtataatatacctaacaaagttccaaatcgtattcctattggtaaaccgattcttggtactcacgtttatatcatgcaaggcgagcgtcgatgtggcgttggtattcctggagaattatgtacaagtggatttgggttagctgctggttatttaaatcagccagaattgacagcagataaatttatcaaagattcaaatataaatcagctgatgtatagaagtggtgatatcgttcgtttgttacccgatggcaacatagattatttatatcgtaaggacaaacaagttaagattcgaggatttaggattgagttgtcagaggttgagcatgcgctcgagcgtatacaaggtattaataaagcagttgttattgttcaaaatcatgatcaagatcagtatatcgttgcttattatgaagcgatgcatacattatcacataataagattaaatcacaattacgtatgaccttaccggagtacatgataccagttaattttatgcatattgagcaaattcctattactattaatgggaaattagataagaaggcattgcctatcatggactatgtcgatacggatgcctatgtagccccgagtacagataccgaacacttgctatgccaaatttttgcagatattttacatgtgaatcaagtaggtattcatgataatttctttgaattaggtggccattcattaaaagcaacgttagtggtgaatcggatagaggcatctactgggaaacgattacaaattggtgatttattacaaaagccaactgtatttgaactagcacaagcaattgctaaggttcaagaacaaaactatgaagtgattcctgaagctatagttaaagatgattatgtgttgagctctgcacaaaagcgtatgtatttattatggaaatcaaaccataaagatacggtatataacgtactttttttatggcggttatcatcagaacttaatgtagctcaattgcgacaagcagttcagcatttgatagcgcgacatgagattctacgaacacaatatattgttgtagatgatgaggttcgacaacgtattgtggcagatgttgtagctgactttgaagaagttaacacacattttacggatgaacaagaaatcatgcgccaatttgtggcaccttttaatttggaaacgccgagtcaaattagagtgagatacattcgaagtccattacatgcatacctgtttatagatacacatcatatcattaatgacggtatgagtaatatacaattaatgaatgatcttaacgcactttatcaacataaattattgttaccacttaaattgcaatataaagactatagtgagtggatgtcgcatcgtgatatgacgaaacatagacaatattggttatctcaattcaaagatgaagtacctattttaagcttaccgacagactatgttagaccaaatattaaaacgacaaatggagcaatgatatcatttacaatgaatcaacaaacgagacagctacttcaaaagtatgtagaaaagcatcaaattactgattttatgttctttatgagtgtggtcatgacgctgttaagcagatatgctcgaaaagatgatgttgtagtcggtagtgtcatgagtgcgcgtatgcataaaggcacggagaaaatgctaggcatgtttgctaatacgttggtatatagagggcaaccgtcacctgataaaatgtggatacagtttttacaagaggttaaggaaatgagtttggaggcatatgagcatcaagaatacccattcgaatgtttagtaaatgacttagatcaatcacatgatgcctcacggaacccattatttgatgtcatgttagtactacaaaacaatgaaacgaatcatgctcattttgggcatagtaaattaacacacattcaacccaaatcggtgacggcgaaatttgatttatctttcatcattgaagaagattgcgatgactatacaatcaatatcgagtataatactgatttatatcactcagaaacagttcgtcacatgggtaatcaatgtatgattatgattgattatattttgaagcatcaagatacactacaaatttgtgatataccaaacggcacggaggaacttctaaattgggttaatacgcatgttaacgatcgaatgcttaatgtcctgggaaataaatctatcataagttactttaatgaagttgtctcacgacaaggtaatcatgttgcgctagttatgaatgatttggcaatgacgtatgagacgttacatgaatatgtagatgctattgcgcacatgctcctatcaaatggtgtgggcaatggtcaacgggttgccttaataacagaacgtagttttgaaatgattgcggcgatgttggcgacagttaaagtaggtgcatcttatatacctatcgatattgattttccgaaaaagcgacaatgtgcaattttggaggatgctaaagtaactgcagtcatgtcttacggcattgaaattgaaacgacattaccagtcattcaattggaaaatgctaaaggttttgttgaatcaaaggaaaatgaacaatatgatgatttacatggcgatcaacttgaaaacacagcgatgttagataatgagatgtatgctatttacacatctggtacgaccggggtgcctaaaggggttgccatacgacaacgaaatttgttgaatttagtgcatgcatggtcaactgaattgcaattaggcgacaatgaagtatttttgcaacatgcaaatattgtttttgatgcatcagttatggagatttattgttgtttgttaaatggtcatacgcttgtgattccagatagagaggaacgtgttaatccagcacagttacaacacctcattaataagcatcgtgttacggtggcatcgattccattacagatgtgtagtgttatggaagacttttatattgaaaaattgattacaggcggggcaactagtacggcatcctttgttaaatatattgagaagcattgcggcacgtatttcaatgcctatggaccatctgagtcaacagtcatcacatcgtattggtcacatcaatgtggtgatttgatacctgagacgattccaattggcaaacccttatctaacatccaagtgtatattatgtcagatggtttgttatgcggtattggtatgccaggcgagttgtgtattgcaggtgatagtttagcgataggatatattaatcgtccagaattaatggctgataaatggcaaaataatccatttggtaaaggaaagttgtatcatagtggtgatttagcacgttatacatctgatggtcaaattgaatttttaggaagaatagataaacaagtgaaagttaacgggtaccgtattgaacttgatgaaattgaaaatgcaatattagctattcgtggtatatctgattgtgttgtcacagtaagtcactttgatacgcatgatatattgaatgcttattatgtcggagaacaacaagtagagcaggatttgaagcaatatttaaatgatcatctgcctaagtatatgattcctaagactataacgcatatcgattgtataccattaactacgaatgacaaggtggatactacgcgtttgccaaatccatcacctatacaacagtctaataaagtgtatagcgaaccatctaatgaaattgagcagacatttgttgatgtattcggagaggtattgaaacaaaatgatgtcggtgttgacgatgacttctttgaacttggtggtaactcattagaggcgatgttagttgtctcgcatttaaaacgatttggccatcatatttcaatgcagacattatatcaatataaaaccgtgcgacagattgttaattatatgcaccaaaatcaacaatcattagtcgcattaccggataatctttcggaattacaaaagattgttatgtctcgttataatttgggtattttagaggatagtctaagtcatcgacctctaggaaatacactattgactggcgctacaggttttttaggtgcttatctgattgaagcactacaaggatacagtcatcgcatttattgtttcatacgtgctgataatgaggaaatagcatggtataagttgatgacgaatttaaatgattatttttcagaagagacggttgaaatgatgttatcaaacattgaagtcattgttggtgattttgagtgtatggatgatgttgttttaccagaaaacatggatacgattattcatgcaggtgctcgtacagatcattttggtgatgatgatgaatttgaaaaagtaaatgttcaaggtactgttgatgtcatacgtttggcacgtcaacatcatgcaaggttaatatatgtgtctacgataagtgtgggaacttattttgatatagacacagaagatgtgacattttcagaagcggatgtctataaaggacaactactaacatcaccatatacacggagtaaattttatagtgaattaaaagtattagaagctgtaaataatggcttagatggtcggattgtacgtgttggtaatttgacgagtccttacaatggaagatggcatatgagaaatataaggactaaccgtttttcaatggtaatgaatgatttgttacaactaaattgtatcgggtttagcctcgctgaaatgcctgtagatttttcttttgtggatacgactgcaagacaaattgtcgcattagcacaggtcaacacaccacaaatcatttaccatgtgctatcacctaataaaatgccggtgaaatctttgttagaatgcgttaagcgtaaagaaattgaactcgtcagcgatgaatcatttaatgaaattttacagaaacaagacatgtacgaaacgattggattaactagtgttgaccgtgaacaacaactagcaatgatagatacaaaattaacattaaaaataatgaatcatatcagtgaaaaatggccaacgataactaacaattggctgtatcattgggcgcaatatatcaaaacaatattcaataagtaagtagggaaagttatgacagtatttgtaatgcaattacagagtaacttgaaaagtattgaagaattaatatcacaaagtcgttggtcatataaaaaaccgcgtacagtcaactatagatacaatcaagataaactcatgcacagattgggagatattttagtgcaatatggaattcaacatgacacaggtttattaccacatgaatggcattatcacatttcgccacgaggtaaggcagatattgttcaacacaatcgtgatggacagcccatctatgtgagcttatcatatagttatccttatatcgtgtgtgttgtcgataaagaaccagttggtattgatatcgaaaagatatcacaacgtttagactggcgtacattagtgacgtgtttctctacaaacgaagcacagcaaatatgtagtttaaatgatttttatcaaatatggacacaaaaagaaagttttacaaaattgattggtgaaggtttaatcaaaggattggacatttatgatatgacgcaatcacacttttatcaatcacgtgaagtgaagttcaaacaatttatttttgatcagtttatggtacaggtatgtttcttaggacaagcaccctgggggtataaaaaagtgtctgtatttcagttattgagtagttaatatgacgtctgacagtatcattgcgcagtgattttaaaatatactgcctaaatgtttactgttagatgttttttttattggaaaaatgaaaggtgaatacacgatggcatcattcaaaatcataacgagattaaagtaagtgataaggtgaaaatatactgagcaatattgaaattgccaaaaataatggcttgttacgacgcatttgagactttaatgctcacgtaagttggctggaatcatatcatgtcagttaataaaataacgtgagtatcaatcatcatactcaaacgatgatttaaaactcacgttaatgttagtcagtgtattaatttaatttatagcgatagacaaaatgttgtcgcactaattcaattgtcatcatccagacgatatggccaaagaattctgacagatgctcttggaatggttgatcccacatagcaggtacagtatgcatgattggcataatgataaggtggaataatacccaaatagcaataccaaaaacagcaccttgtcccattgctaagtaagcgtattttttaactaatatgcagtaaataattgcaatgacgatagaaaaactaaagtggacaataaagcttacccaaggcaattgcatatttgaaaatgtatatgtttgatgcgtaaactcactactaaatcctaattgttgcaataactcttgaggtgggttcgttgcattacgttctggtgtgcgaggtggaaacatgacctcccaacctaattttacaattccagataacaagccaccgataattccagcataaatgaatatacccatttgtcgttttgtcaacttaaggactcctctctatttactatcctcattatagtattttgtgaaaataatcacaatgaaaagctttgcaaaacttaaaatattttgatgaacaaatttgtaaaaggttattagttttttgcatctcatattgtatcatactgtattctgaaatttcttttgtgaaatgagacaggtgaaaaggtgacgctgcataatcattaaacaaataggtacaactatgtttcgaagccgaataatacaagattgagtggtcatattcaaagtcatactgatgattttagtatcgttgtcccaacaaaatcattattataaatagcttcaatgatatttggcttgtttcctgatgcaatgataactttaggacagccattttcaatagcatttttagcatcaagcactttgggaatcatacctccataaatatcaccatgctcaatatactgattaatatcgactaatggcaattgaggtataacaacatcattgatgagtacacctgcaatattacttaatacataaataggcgcttttaatgatgatgcaataaaataggcaagcgtgtctgcatttatgttgtaaaattctccatcatgggtattgaaaccaatcgaattgatgataggtacaaatttagtacatatatacagtaaagcatccttatttaaagcggtcggtaccccgacatatccatattgttgatcaaaacgtttaatttcaaataattgagcatccaaaccacataagcctattgcagaacattggtgctggttaaattgagctactaatgcagtgttaacgtctgcaatgagcgtgtgtttagtaatagtcatggttgctttatcagtcactcttaggccattaacaaagtgtggctcgatttgctgatttgataatgcttcattaataaatgggccaccgccatgaacgataatggggtagatgttgtttgatcgtaaatgcttaatgttgttaataattgatggatgcatgtcacttagtgtactgccaccaattttaatgacaataaatttcatctaaccaacaccaccttatgttcgatatgatgcgttaatacgcacataatcataggataaatcacaaccgtatgcagtcgctgcagcgttacctaaaccaagctgaacgtcaattgtgacattttcatgagttaatgtattcgacatagcttgctcatcaaatagtacagccatacctttatccacgacaggtatttggttcagttgaacatatgtgctgtgtggattaatgtcacatccgctgtagccaatagctgtaatgattcgaccgaaattggcatcttcgccaaaaattgctgatttgactaagtttgaacttacgatagttttaccgatttttcttgcgtctgatattgatttagcgcctgaaacattgacactgattaactttgttgcgccttcgccatctctggctatagctttagctaaaaatgtacagacaaaattgaatgcatcaacaaatgtttcccattgtggatggttttgatttaatgtttggtgatcaacttgctgatttgccataactaataccatgtcatttgtacttgtatcgccatcaacagtaatcatattaaatgtatgatcagtcgaagattttaataattgatgaagtgtattcgattcaattgatgcatctgttgttataaaagcaagcatggtagccatatttgggtgaatcatacctgaacctttggcgctaccaccaattgtaacggttttaccatcgatttttagtgatacagcgatatgctttgtacatgtatcagttgttaaaattgcctcgttaaacgcaccagccgttgtatacttagtatccttaatatgttcggtcccagtcttaattttatccataggcaaatattcgccaataacaccagtagacgttacagccacgtgttcagacggtatatggagttgctgagcagcccaagcttgtgtttgtcgtgcatcatctatgccttgttgaccggtacaagaatttgcatttgctgaattcacaatgagtgcctgtaattttcctttagacttttgtaaagcttctgcagtaacgataagtggtgcagctttaaactgatttaaagtatatacggcagctgcacttgctaaagacgatgagtaaatccagccaaagtcttttttgttagcgcgtaaaccgatgtgcataccaccggccgtaaagccttgaggtgtactgatatcgccatgtttaataattgaaaagttatgttgttgtgatgtcgtttcttgatgtttcattctaacaccccttatggataaactggtgattgttttaggccagtcgtaacttcaaaatcatataatatatttaagttttgaatggcttgaccacttgcccctttgacaaggttatcaatcactgatactaaaattgctgtttgcgttgtttcatctacatagataccgatatcgcagtagttactgccgagtacttctttggtagtcgggaaatttccgatatctctaattctgacaaaaggttggtcagcataataagaagatactaatttatgtaatgattcagttgtatatttagaagttaatttgacataaatcgttgataaaatgccacgtgtcattggtacgagatgtggtgtgaatatcactgatacatcttgacccgcaatgatagataaatattgctcgatttccggtttgtgtttatggtttccgattgcataagcgcttagattttcattcatttctgaaaaatgaacacgttgtgataatgaacgtccagcacctgacacgccggtcttagcatcaataataatagatgacaaatctacaattctttcgctaatgagtggatgtaatgctaataatgttgctgtagggaaacagccaggattagaaatgagcttcgttccattgttattaaacgattgccattctgaaatgctatagatagcgtgatttaagtcgtcttgtgatgcagcagtttctttgtaatatgcttcatatatttcacggtttttaattctgaatgcaccagataaatcaataacatgaattcctttttctactaaaggagggatacatgttttactcacgggtgccggtgtagcaaagaaaattacatcacagtcattattgtcaactgtaagtgcttcgaaatgttgcataatatgttgtaaatgtggaaatgttaatttcaacggttcatctacttttgaatgtgagtagatgtgtgcaatcgttacatgaggatgtgtttgtaataatcgaattaattcaattgcgccataaccgctaccgccaacgatacctactttaatcatcatgaatccctcctatatcatatataaatgattaattgttaatttttaaaaacgtcttgaaaagctgcaacaatttgattgatttcctctttatcaatgactagaggtggtgacaatcgaatgatagtacgatgcgtgtctttgcataagattccacgtttaatcagttgatccacaaaaggtgcagcatctgtgttaagctctatgcctataaataaaccacgacctctaatttctttaatactaggatgtttaagttgtagcaacgcttttaataaaaatgaacctaagcgttctgattgttcaaccagttgttcatctttaagtacatcaagcgctgcggtcgatattgcaatggctaaagggttacccccaaatgttgaaccatgtgtacctggtgttagaacacgcatgacatcattatttgctagtacagcagatacagggtataagccaccgcccaatgccttgcctaaaatataaatgtctggaacgacttgctcccattccatagcaaaccatttcccagttctaccaagaccaacttgaatttcatctgcaatcaataatatttgatgtttatcacataattgacgtacagcttggatatatcctttcggtggtatattaacgccaccttcaccttgaattggttccaaaataattgctgctgtattcggtgtaatagcttgtgttagttgctcaatatttccaaattctactgttgtagtgccttgaagtagggggtgaaatcctgctttatatgcgtcgtggttagatagtgataatgagccaagtgtacgaccgtgaaaattgttattcatagcgatgatttcaacttgtccgtcagtgatgcctttaacttcagagccccattttctagcaattttaatggctgcttcaacagcttcagtaccagagttaagggggagtactttgtctttcttagcaagatgacaaattttttcttcccatttcccgagattgtcactataaaggacacgtgaaatgatagacaactttgaagcttgttctgtcatcgctttaacaattgttggatgacaatggccttggtttgcaactgaaaaacctgagatgcaatctatatattgtttgccattagtatcccaaactttgacccctttacctttagaaatgacaagcttcagtggtgcataattgttagagctataatgatcagttaattcaatgatagaattcatgggtctccccctcctttatatttatacattttaaagaattaatattaatacattacagttgttcaatataagtttcaaatgtaaatttaataatataaagataagattgtgtttgtattaatgtgattcgtaaaatgaaagtactaatatttttcgtggataaccattgatatgtatgtatacgagtgcagtttaatgtagtatgaataaaaaatcagattgagtatatgcatataagatgatttttaacatcatttttggatgataggatgttgcgccacgatgatgtctgaattcatcgaattcgctatcaggtatcgtttcaacaatttcattaatatatcgcgaaatatcattttgagggattctaacagaagtttctattggtagtgtaagttgggcaaagtgtcttattttttaaagtatttaaaagtaaaattacatgttaaaacgtagtattaatggcgagactcctgagggagcagtgccagtcgaagacaggggccccaacacagaagctgacatatagtcagcttacaacaatgtgccggttggggtggctgagacggcaccctaggaagggacccatcatcaaaaattctatttatagaattttacagtaatgtgccagatgggcatagcgaagccattcaatacgaagtattgtataaatagagaacagcagtaagatattttctaattgaaaattatcttgctgctgttttttagggatttctgtcccactcccatagtattatgcttgtggaattttacgatgcttaattttataaataatgaagccgataatgaaaccaatcaaactgagaacaacccagcccataccaatgtctgataatggtaaatatttttggctgaaattaatcaaagtttgtgagaatgatgtgcttgaaatgaactctggactagcttttaatccatctactaatgcagcaatcattgtaaagaaaatggtacattgataaataatttttgaatgatggaatttgctactaaataatgttagtacaatcaaggcaattgctaatggatataagaacattaacactgggactgagtacataataatcttagttaagccaacattcgcgaataagaatgagataaagctcacaactgttgcaatcgctaggtaattcattttagggaaaaggtgttcaaatgtttctgaaaatgccgtaattaaaccgatagctgtttttaaacaagcaaccataacgatgagtgataacaagacgataccgtagttacctaagtagtattgcgtaatttgcgctaaggcaataccaccattttcactaagtttgaaatgaccaatacttaatgtacccatgattgctagtagggtataaatgatccccatcataatgatactgatagtaccagacttaattgtttctttagcgatatcagttggattttcgatacctaactttttaatcgttgcaacaataatgataccaaatgccaatgacgctagcgcatctaaggtattgtatccatctaaaaagccgttaaataaggcgtttgattgatattgtttactaataggtgcatcagatatgccacctaatggatggataaaagcaaataataaaataattgctaataatactaagaataccggatttaaaaatttaccgatatattctaaaattcttgatggctttctcgcaaaaaaccatgcaatcacaaagaagacaaagctaaaaataaataaatataaagtaatttgctttggtgataaaaatggcgaaaatgcaatttcaaatgatgtcgttgccagtctaggtaaagcgaaaaatggcccaataactagatataaggcaatcgtgaaaatgtaagcatatgttttattaacacgtgatgcaatttcaaataaaccagatgtctttgaaatgccaatagcaatgatacctaaaaacggtaagccaattgctgtaattaaaaatcctaagttagcgataaaaacgttagaaccagcagcttgacccaagtgtattgggaagattaaattgccggcaccaaagaataaaccaaataacatagaacctataaacatgttttctttaaatgttagtttcttcttcatatatgtatttgttctcctttttagaacttataaaaatctacttaattaagataatatcaaaaattaaacctaaagtgatacataattttgtaataaatactaaattttttgaaaattccggaataaatactgtttttatgtagtaagggaataggttaagaatggtttaacagatatagaatatgtttatatagtggaggttagacaacccgacgtattaatacattgtgaaataaagatacccccttcaatataatcgaagggggaagtgtatgtttagttcaatatgtttagcaagtcgtttgtggttatggtttgtcccatcaatgggaatacataatctattgggaattgatgtagcgtttcgttttgagcgctcatcatatctgtaacaaaatactgattgtagtttaattgataggcatctcgcgctgtcgtatctacaccaatatgcgttgcgacaccaccaagaacaatcgtatcaattcctcgacgtcgcaattgtaagtctaaatctgttcctacaaatgcactaaaatgtcgtttgtctatgacaaaatcgtcatctcttttgtctagtaaataatggaaatggctgtagtcatcgccttcttttgctggtaatgagatcattgcatttggttgcaatgcatctttaccatcatagaaattcacgcgaacaaacgcgataaagccattgttttttctaaaagcttcaattaacttgttagcattttgaacaacattttcagctgtatgtggcgcataatccattttaagaataccttgttgcaggtcgattaacactaaagcggttttatcaaaattaatcatcttatatcaaagtccttttcatttaataatatatctgttaaagcttataccctgtatacgatgaaattatttattttgttgcgaaaaagctttagcaatatcgatgagtttctttggtgcgtcttcgacagacattttgacttcgacaaaatgcatcacatcgggatgaccattaattgcattaaatacctcttgtaaatcttttgatgattcaacgtcatgaatttcaacatttttaccaccaaatacagctggtaaagctttataatcccacatatgaatttcattataaggttcatacatgccgtgaataagtcgttctaccgtatagccgtcattattaatcacaaataataccggtttaatatgctgtctaatcatagttgaaatagcttgaacagttagttgcaatgagccatcaccaattaataataagttacgacgatctttgtttgctaattgtgaacctaatgttgcaggtaatgtatagccgatagaaccccataacggttgccctataaaagtattgtttttgtataatgctaaatcataagcaccaaagaatgatgtaccttgatcagcaataatgacatcatttggttttaagaaattttgcatcattttaaaataagtttgttgtgttaatggttctgtgccaacagtataatcgggtgatgttggacgatgataagcagggaacgatgcgttattcgtatatgatatatcggtcaattgttgtagtaatgatggtagagatatttcatcatttgtaacatcatcaattttgatattgtggtgatttagcataacgacatcgtcgatattgaattggtatgaaaatcctgctgttgctgaatctgttaatttggctccaatatttaaaattaaatcgctgttgtccacataatcgcgtattttatcttcggcaattttcccatcgtatatacccatataatatggattttcctcattaaaagcaccttttcctaatgaaagttgtgctactggtatctgtgtttgatttacaaaatcttctaattcttgatggaggtgaaaactgttaatttcatgtccagtaatgatgataggctgcttcgattgatgcaatttagatgctaataactctatatatgttgatgcatcagtatctttggctgtcgtcacttcgaatggtgttggtatctcaatttcagagattgcgacatcgatcggtaaatgtaaatgaactgggcgtctttcggcgattgctgtattaattaaacgtggtatttcggttgttgcattttcaggtgtgatataaccttgtgcaacggttatatgcgcaaacatttttcggtagtcgtcaaatgtaccttcaccaagtgagtgatgtacatatttaccggcttgttcaacagcacgtgtcggcgcacctgtaatcgcaatgacaggtatacgttcagcatacgaacctgcgataccgttgacggcacttaattcgccaacaccaaatgtagtaactaatgcagcgagtccattaagacgggcataaccgtccgctgcgtaacttgcgtttaattcatttgtatttcctacccaatctacattgggattactgataatatcgtctagaaaagcgagattaaaatcaccaggaacaccaaaaattttatcgacgcctgctcgatgaatagcgtcaattaagtaagctccaatgcgttgtttcataaaaaaaccaccttttctctatatttacacttaaaatgatagcctcgaatatagtgtaaggtcaaggaagttgactttgttgtgaaaacgctaacaatagtgagcaattaatattttttaggaaatgagtatgaagggggatttaattgatgatcttaaaattcaaaatttaaggggagagcgaactatcaatgatgctgcaaaacacaatagcaatgaaaaaacaggcgcgtcaccttatgaaggtatacgcacctgtttatagtaagcattatttagcttcaaataattgatcgccaaatgaaatgttgccatgttcaccttgtttaaaatcaaggtttgtaatgtttccttgtgtaacgataataggcgtaatatcactctttgcatgattgcggatgtagtctaaatcaaagttgattaataaatcaccttgtttaacttcttgaccttcctcaacatgtaaagtaaagccttctccgtttaatttaacagtgtctaaaccgatgtggattaatagttctaaaccactatctgatacaagaccaattgcatgttttgttgggaaaatcatttgtactttaccgttgaatggtgcacgaacgtcaccttgtgaaggtttaatagcgataccgtcacccatcattttttcgctgaacacttgatcaggcacttctgataatggtgttacttcaccagttaatggtgcatgaacgatatggctcaattcgcttgttgcagatgtatcttctgcaacaacaacagtttcgtctttatcgtcttccatcgtagtagggttttctactacttgaccattcataatctgttgcatttcatgtttgatttggtcagatttaggaccaaaaattgcttgcatattattgccgacttctaatacaccagatgcgcctaaatctttcaaaccaggaacatcaactttagatttgtcgttaacttcaacacgtagacgtgtgatacaagcgtctaaatgtttaatgtttgctttgccacccatagcttctaatactgcatatggtaattcagttgctgaagcagtagccgcttgtgattgtttatcttcacgacctggtgttttgtattttaattttacaattaggaatcggaatacgaagtagtaaataactgcgtatacaagacctacaggaatgactaaccaccattgtgtcttattaggtagtataccgagtaagaagtagtcgatgaaaccacctgagaatgtataacctagatgaagatctaataagtacaatgttaagaatgataaaccatcaagtactgcgtgaataaagaataataatggtgctacgaataagaatgagaattctaaaggttctgtaataccagttaagaatgatgttaaagcagcagaacccattaaaccggctactactttcttgttttcaggtttagctgtgtgataaattgctaaagctgctgcaggtaaaccgaacatcataacagggaattcaccttgcatgaatttaccagctgttaaatgtgcaccttcacgaatttgttcgataaagatacgttggtcaccgtgaataatttcaccagctgcatttttccatgaaccaaactcgaaccagaacggtgcgtggaaaatgtgatgtagaccgaatggaattaataaacgcttgatgaaaccaaataagaatacggcaacaccagtatttgaatctaataatcctgtactgaatgcatttaatcctgattgaatcgttggccaaattaatgccattgggaatgctaaaataaatgatgttgtagccatcataataggtacgaaacgcttaccagcgaagaaacctaaataagatggtaagttaatgttatagaacttgttataacaccaagctgccagagccccgattataataccgccgaacacacctgtttgtaatgttgggatacctaaaatgctagcgtaaccactcgctggatcaccaatgttcttaggtgttacttgtaaaaagtcacccattgttttgttcatgattatgtaaccgacgaatgctgcgatagctgctacaccatcaccgccagctaatccgattgcgacacctaatgcgaaaatcataggcaagttatcaaaaatgataccaccagcacctgtcattaatttagcgacagtttgtacgccaccattttgtataaacggcaagtagtgttgtaatgcttcaccttgcatagctgtaccgatagctaataacagacccgctgctggtaaaatcgcaacaggtaacattagtgccttaccaatacgttgcaattgaccgaaaagtttcttcctcacttgtccaacctccaaagttgtagttattatttaagattcaataaaaaagacacgagcaaatagactgtgttggtaaccatcacagcttaatttaactcatgcctaatcttacttagtaacacgttggtgtatgtaattaatgtaaaagaagcaattgactaagtagtatataaaactgatacgttagtttatctagcttaccatcacatcttattgaatcttatttgtttgcgactcctattttagcatggtgaagtatgcgttttcaatacaattattaaattcaatttcaaatctcttaattgttcacaaattattattaaaatataatataagataatcctgaataaaatgtataaaagttgttgcaacaattcagcagtagcaactgttttcgagcgttaaatgataagaaaaatatgtcgttttaaaaaattaacttgtgacagaaatatgtaagattattacaatgaataggctttaactgattaatattgtaatgtgttttctcttatagtaaaatgtaagcgattacacaactcaactatattttcctaataattatattgttaaggagggctactttgacaggcttttcagtgtatttaggacaacctttagatgaagcgtatattaagcgaatgattaaacaaggttaccaaatgatttttacatctgtacaaataccagaagaagatgacgagacaaaatatcattatttcacaaaactactcaatttattaaaacatgaacaagtgacttacctcatagatgctaatccatctatattaacaccatctttttatgagcatcttcgacaatatgatgcacaatttatgattcgtatcgatcatagtacatcaattgaggcaatcgaagcgataatggcacagggtttaaagtgctgtttgaatgcaagtattatttcccgggaattgttaacaagcttacatcaacaattgaatgattttacattactttcattttgtcataactattatccaagaccagatacgggattatctgttgacttggtcaataagaaaaatgaactcatttatcaatttaatccaaaggcacaaatatatggttttattgtagggagtggtttgcgaggtcctttgcataaaggcttgccaacaattgaagcaacgagacatagtcatcctgtcgttgcagctaaattattacaagaaactggtgtatctgaagtgttagttggagacgcattgattgaaatgaggcaggcaaaacaacttatagatttttgcaagcataggcatttcacgttatgtattgaagaagtgtttgatacgacagtgacttaccttttcgatatgtgtcataaagtacgtccggataatccggaaaatgtcattcgttcggaaacatcaagacaaatatgtccacattcgatacaaccacagtttacaacgcaacgacgcattggttcagtaaccgttgataatttgaataacggacgttatcaaggtgaaatgcaaattgtgagacaaacgcttagtgcacatgacaatgtgaatgttgttgcacaaattattaaagaagacttaccactgttaagctgtatcgagccgaatgatacatttgattttcaaaaaactagggagtgtaagaagtgatggaaaatagtacgaccgaagcgcgtaatgaagcgacgatgcatcttgatgaaatgactgtggaagaggctttaattacgatgaataaagaagatcagcaagtcccgttagcagttcaaaaggcaataccacaattgacaaaagtaattaaaaaaacaattgcacagtataaaaaaggtggacgattgatctatatcggtgcaggtacaagtggacgattgggtgtcttagatgcagcggagtgtgtacctacattcaatactgatcctcatgaaattataggtattattgctggtggaaaacatgctatgacgatggctgtagaaggtgcggaagatcacaaaaaattagcggaagaagatttgaaaaatatagatttaacatcaaaagatgtcgttataggaattgccgcgagtggcaaaacgccatatgttataggcggtttaacatttgctaacacaatcggtgctacaacagtatctatttcatgcaatgaacatgcagttataagtgaaattgcgcagtatccagtagaagttaaagttggtccagaagtattaactggttcaacgcgtttaaagtctggtacagcacaaaaattaattttaaatatgatttcaaccataacaatggttggtgtcggaaaagtttacgataacctcatgattgatgttaaagcaaccaatcaaaaactgatcgaccgttcagtgcgtattattcaagaaatatgtgctatcacatatgatgaagcaatggcgttatatcaggtatctgagcatgatgtgaaagttgcgacagttatgggtatgtgtggcatttctaaggaagaagcaacaagacggttattaaacaatggtgacattgttaaacgagcaatcagagatagacaaccttaggagggatttaaatgaccaaagaacaacaacttgcagaacgaattattgctgcagtaggtggtatggataatatagatagtgtcatgaactgtatgacacgtgtgcgtattaaagtattagatgagaataaagtagatgaccaagaactaaggcacattgatggtgtcatgggtgttatacacgatgaacgcattcaagttgtggttggacctggtacagtcaataaagtggctaatcatatggcggaattaagtggtgttaaactaggtgaccgaataccacacaatcacaatgatagtgaaaaaatggactataaatcatatgcagctgataaagcaaaggcgaataaagaagcacataaagcaaaacaaaagaatggtaagttgaataaagtattgaaatcaattgccaatatctttataccgttgattcctgcatttattggagctggattaattggtggtattgcagcagtactgagtaacttaatggtggcaggctacatttcaggtgcttggattacgcaacttataacagtatttaatgtcattaaagacggtatgttagcatacttagctattttcactggtattaatgcggctaaagaatttggtgcgacaccaggacttggtggcgtgattggtggtacaacgttattaacgggtattgctggtaaaaatattttaatgaatgtcttcactggagaaccattgcaacctggacaaggtggaattattggcgttatttttgccgtttggattttaagtattgtcgaaaagagattgcataaaattgtgccaaatgcgattgatattattgtaacgccgactattgcattgttgattgtaggactattaactatctttatctttatgccattagcaggttttgtttcagacagtttagtttcagtagttaacggaattattagtattggtggcgtatttagtggatttatcattggtgcaagcttcctaccgttagttatgttagggcttcatcatatttttacgccaattcatatagaaatgattaaccaatctggtgctacttacttattgccaatagcagcgatggctggtgctggacaagtaggtgccgcattagcactttgggtaagatgtaaacgcaacacaacattacgtaatactttaaaaggtgcattgccagttggtttcctaggtatcggagaaccattaatctatggtgtgactttgccattaggtcgacctttcttaactgcttgtattggcggtggtattggtggcgctgtaacaggtggaattggacatattggtgccaaagcaataggcccaagtggtgtgtcactattaccattaatctcagataatatgtatttaggttatattgcagggttacttgctgcgtatgctggtggattcgtttgtacatatttatttggaacaacaaaggcgatgcgacagacagatttgttgggtgattaatgatgacaaatattttatatcgcattgataagcagttgagtgattttacgaagacagaaaagataatcgctgattacattttaaagaatccacataaaatcattgatatgactgtgaatgatttagcagatgttacgaatgttagtacagcatcaattgttagatttagtcggaaaatgacacatcaaggttttcaagagctaaagattgcgatatctcgatacttacccgaagatattgcaaccaatccacatttagaattgattgaaaatgaatctgtagaaactttgaaaaataaaatgattgctagagcaaccaatacgatgcgatttgtagctactaatatcatggatgcgcaaattgatgcaatttgtgatgtgttgaaaaatgccaggacaatatttttatttggatttggcgcatcgagtttgactattggtgatctttttcaaaagttatctcgtattggcttaaatgtcagattattacatgaaacgcatttacttgtgtcaacatttgcgacgcatgatgatagagattgcatgatttttgtgacgaatcaaggtagtcatagtgaattgcagtcaattgcacaggtggccacacattacagtattcccatcataactatatctagtacagctaataatccagtggcccaaattgcagactatgcattgatttatggcagaactgatgaaaatgaaatgcgtatggcggctacaacgtcactatttgcacagttattcacagtagatatattgtactatcgatttgtagcattaaattatcatgcgattctagattgtataacccaatcgaaaatggcacttgataattacaggaagcatcttgcgacgatagattttaaacattagatattgtgtgtgttctaatataaagttagttgcaacgtaaacaattgaagtttttgatgtgattcagttgcttgatgaaaaattgttgatacaagtttgtaaaactggcatagaggctattttgaaaatgataaaggcgtgacaaattaaagcaaagttcagatttgagctttgcttttttcatagtatagaaattaaatgctgaagaataattttaatgctaaatgaactaatacgaaggtgctaaaagtaattattatcaaattagtgatatgaatgaaatgtttaaatcgtttgcgttgattgtattcgggacttttatagagtaggtagtagtacataaagagtatggctgcgaacatgccgaatattgaagtgaagttacctacagtgactgccatgaaatgatttaatgttaaataataacttagactgataattaaaaataaaataatttgataggcaattaacaccattcaagtccctccattaatcgtaggcaaaaaatttatcaatgatttgattatttatattcaaattttagtatacgacttacctcaaagacaaatattaaaagataagacaataaaattagaataaatttatgtttgaagataaaaaacaaacatttttcattaaagtttatgatatatttagagcaatagaaagtgtgtggaaggggatatgaatggcataccaaagtgaatacgcattagaaaatgaaatgatgaatcaacttgaacaattgggttacgaaagggtatcgatacgtgataataagcaattgcttgataatttcagaacgattttaaatgagcgtcatgcggacaaattagaaggcaatcccttaacagataaagagtttcaacgtctgttaacgatgattgatgggaaaagtattttcgagagtgcccgtattttacgtgataaattaccacttagacgtgatgatgagtctgagatttatttgtcgtttttagatacgaaaagttggtgtaaaaataagtttcaagtgacgaatcaagtatctgtcgaagatagatataaagcacgttatgatgtaacgatattaatcaacggactaccccttgtccaagttgaattgaaacgtcgaggtattgatattaatgaggcgtttaaccaagtaaaacgttaccgtaaacaaaattacacaggcttattccgctacatacaaatgtttatcattagtaatggtgttgaaacgcgatacttttctaataatgatagcgaactattgaagagtcacatgttttattggagtgacaaacagaataaccgaatcaatacattgcaatcgtttgctgagtcgtttatgagaccttgtcaattagctaagatgatatcgcgctatatgattattaatgaaacagatagaatactgatggcaatgcgcccgtatcaagtgtatgcggtagaagcactaattcaacaagcgactgagacagggaataatggatatgtatggcatacaactggaagtggtaagacattgacttcttttaaagcgagtcagattttatcacaacaagatgacattaagaaagttatctttttggttgaccgtaaagacttggatagtcaaacagaagaggaatttaataaatttgctaagggtgctgtcgacaaaacttttaatacctcgcaactggtacgccaactaaatgataaaagtttgccacttattgtaacgacaattcaaaaaatggctaaagcgattcaaggtaatgcccatttattagaacagtataaaacgaataaagttgtatttattattgatgagtgtcatcgcagtcaatttggtgacatgcatcgtctagttaaacaacatttcaaaaatgcccaatattttggattcactggtacgccacgtttcccagaaaatagtagtcaagatggtagaacaactgcagatattttcggtagatgcttacatacgtatttaattagagatgccattcatgatggtaatgtacttggtttctcagttgactatattaatacttttaaaaataaagctttaaaagcagaagataacagcatggttgaagcaattgatacggaagaagtatggttagcggataaacgtgtggaattagtaacacgacatatcatcaataatcatgataaatatacacgtaatcgtcaatattcaagtatatttacagttcaaagtattcacgcgcttattaaatattatgagacatttaagcgacttaacaaaaagttggaacaaccattaacggtagctggtatatttacttttaaacctaatgaagatgatcgtgatggtgaagtgccatatcattcacgtgaaaaattagagataatgattagtgattataataaaaagttcgagacgaatttttcaacagacacgactaatgagtattttaatcatatttcaaaaaacgttaaaaagggcgttaaagatagtaaaattgatatcttaatcgttgttaatatgttcttaactggttttgatagtaaagtactgaacactttatatgttgataagaatttaatgtatcatgatttaattcaagcgtattcacgtacaaatagggttgaaaaagaatcaaagccatttggtaaaattgtaaactatcgtgacttgaaaaaagagacagacgatgcactgagagtattctcacaaacaaatgatacggatacaattttaatgcgtagttatgaagagtataaaaaagaatttatggacgcttatcgtgagcttaaaatgattgtgccgacaccacacatggttgatgacattcaagatgaagaagagctaaagcgctttgttgaagcttatcgtttattagctaaaataatattacgtttaaaagcatttgatgagtttgagtttacaattgatgaaattggaatggatgaacaagagaatgaagactataaaagtaaatatttagccgtgtacgatcaagtaaaaagagcgacggctgagaaaaataaagtatccattttaaatgatattgatttcgaaatagaaatgatgcgtaatgatacgattaatgtgaattatattatgaatatattgagacaaattgatcttgaagacaaagcggaacaacgtcgtaaccaagaacaaattagacgtattttagatcatgcagatgatccgacattgaggttaaaacgagatttaattagagaattcatcgacaatgttgtaccttctttaaataaggatgatgatatcgatcaagaatatgttaatttcgaaagtattaaaaaagaagcggagttcaaaggctttgctggagagagatctatcgatgaacaagccctaaaaacaatttcaaatgactaccagtatagtggtgtagtaaacccacatcaccttaaaaaaatgattggtgatttgccattgagagaaaaacgtaaagcaagaaaagccattgaatctttcgtggcagaaacaactgaaaaatacggtgtgtaatgattcagccccctcgctagattagtgtagggggcattattatttcattagaaaaggctcatgtgtttggcaatcatcacttggtttcaatacaattttatcatcgtatgtgtatagaaataatgtctataggcatttaaaatagtttataatattaacaggataagtattaaatgtatgttgaaggaggtgcgtagctatggataatagaaatatgattaatcgtgtttttagtcaaaagatattacatcaaattgcaatcaaaaataaaagtgatgttgttgatgaggcatatgatttttatatacagggacctaaaaatatcaatgtaatacagaagatgaaatctttatataattatcttaaaaagtcttatcgtaacgaatatttttacaaaaacacaatgcttaataaactccttctaggacgacattctgttaatacaactactgcactttctgagatgcccatagggaaaagtattgctgattttatattgttaaacggcaaaggtgttgtctatgagattaaaacagaattagataagttggatagattagataatcaaattaatgattattatgaagtgtttaattatgtcgtagtcattacaaatgacaaacatctgaataaagttatggctagatacaaagatacaacagttggaattttagtgttaacttctagaaatacactgagtgaagttcaaaaacctaaagaaaacaatagtctcttaaacacaaaagcgatgtacaactttttacgaaaagaagaaagaaaaagagttattgcacaaaatcatatggatgtgccaacttataatgatttcacagagtatgatgtgttatttgacgtgtttaaagaaataccaatgacgaaactgcataacaatatgatttctgagttgaaaaaaagaggcaacatgaaagaatacaaagatgaatttttagcagctccgactgaaattaagttcttgttatatttcgcaaaaatgacaaagaaagataaaaataaactatatcattttcttaaggatgcaaataatcccccgcactttatatagtggcgggggatttattctggcgtcaaaatacccaaagtatgggtgtgactcttaaatcatggcaaagcatctaacacttgatatggtgccgagccctaacttagcacaatatagttagtatgacaaagacatctaacataacacatcagaagttgcccaatttattccagaccatacagtgatatagttgcacaacgcatgacttttatttagcaataactgctacttctgaaataagttgttttgcatagtctgattgcggatgtttgataatatcttctgtgttattcagttcaacgatttcgccatttttcataactgcaacgcgatcacatatttcattgataacacccatgtcatgtgtgatgaataaataagtgatgccgaagtctaactgtaattgttttaataactcgatgatatctttttgaattgaaacgtctaaagctgacactgcttcgtcgcaaacaatcactttaggttctacagcaagtgctctcgcgatacttacacgctggcgttgcccaccagataattcgtgtggatagcgatataagaaactttgatctagaccaactttttctaacaacgatacgacagttttaataatgtcgtcattatctttgactttcccatgaatgattagtggtcgtttaatcacatcaatgactttaaatcttggattaatagatgcgaatggatcttggaaaatcatttgtatctcttgtcgtaaagatttcaattcatcatctttaaataaacttaatggtaattcgttataccaaataaagccttctgacacttcctttagaccgacgaccgtcttagctaatgtcgatttccctgaccctgattcaccgacaatgcctaatgtttcgccttttctaatagccaagttaatatcattaactgctcggtataggctaccatttggcgatgtataatctacactaacgcgatcaaattttaataaaatatcattgtttaacgttcttggcggacgcgtttgatgaatatcaggaatcgcatctattaagcgtttcgtataggtatgttgtggcgatttaaaaatactttcaaccgtgccactttcaacgacactgccatctttcattacaatcacatcgtcgcaaaattgatacacagcgcctaaatcgtgagtgataaaaataatagacgtttctgtgtactcataaagggacttcattaactgcagtaattgattttgtgtactggcatctaatgccgttgttggttcatccgcgattaaaatttgtggctttaaaatcaatgccattgctatcatgacacgttgacgcataccaccagaaagttcatgcggataagcatcaaattgtcgagttgcatgttttatacctactttttctaaaatgtctattgtcatcgactttgcttcagatttagatacacgtttatgttgaaatagtacttctgtaatttgtttgccaatcgttaatcttggattcaacgaagagagtggatcttgaaaaatcattgaaatatccttacctcgaatttgttgtaacgctgaagttgataaattagttaacgattgcccattaaaaataatttctcctgttaacgtgtgatctggataatctggtagtagccctaaaatagatttagcggtaatactttttcctgatcctgattcaccaacaatacctaggatatgtttttttcgtaattcgaaagagacgttttttaccgcttgaactgtagtttcatcataattgaattgtacattcagactgttgacttctaataaatttgacatgatgttgtgcctccctattcacaaatgtgtaaatttagtctatacttttgtatatcatagtaatctactcaagattattttacaaggagtgattatcataattacttatttagaatcttttaagtcgttgtatcacaaggcattttacaagtttgtattatcggtattaagcttgccaatatttttatatgcagtgataaagtttttcttttctgctaagagaaaaaatttttacgctaataattctgaaatttcagaaattgaacaggcgttacatcaaaaatataaatatttatcgcagcaaaagtcatccacacaaatacataaagaagcattaaaaatattcaaggcacaaagttctaatacgaattcaaagaatattgaacaagcacatttttcaacatactttgaaaatgtattatttcataagttcatcataatcaaagtgatattggcgttaccgatgttcatcttattgactatttatttacagccattagttagatatatttttgagcgaattgtcatggctgtgattgtcatcattggtgttattgtcagtgtgtttaccattctgtatttttcaccgcttgatgcggcttatagcatactgggacaaaatgcaacaaaggcacagatacatcaattcaatgtattacatcatcttaacgagccttattttattcaattgtgggataccatcaagggtgtttttacttttgacttaggtacgacttacaaagggaatgaggttgtgactaaagcagttggcgaaagaattccaattacaataattgtcgcagtattagcgctaattgtggcattaattattgcgataccaattggaattatcagtgcgatgaagcgaaatagttggcttgatatcacgttaatgataattgcattaattggtttatctattccaagtttctggcaagggttattattcattttagcgttctcattgaaattggatattttgccaccatcttatatgccagaacatccaatatcgttgattttacctgtacttgtcattggaacaagtattgctgcttctatcacgcgtatgacaaggtcttctgtacttgaagtaatgcgcagcgattatgttttaactgcttatgcaaaaggattatcgacgacacaagtagttattaaacatattttgaaaaatgccattattccaattgtaacgctagttggtcttctagtggcagagttactaggcggttcagcagtgactgaacaagtatttaacattaatggtatcggtcgttatatcgtccaaaaacaactaatacctgatatcccagcagtcatgggtggggtcgtatatatatcaattgtaatatctttagcaaacttaattattgatatattttatgctttaatcgatccaaaattacgtagtgaaattaacgaaaggaagtgaggcatatggtaaaacttacaacaaagatagcttccttaaaactattcgcaagttatgctattgcaacttatattttagttatattaacgagtgcattaaatctttttaaaggttatgtggccgatacattctatattgctgaaacattgctaatcgttttaaccatcattttaattatcatcttaacaacggaacaaacatggaagcatcgtgacctatggcgacgtatcgtcgaagtgttgttattgttgatgacattaacaggcaacgtttttacattattaatgtttgtaagtattagacgttaccaacgtacatcgcaaatacatagttataacgggtgggaatcgtttatacgaaaaactactagacatcgtattgcgattatcgggttacttattttagtctacatgctgacattatcaattgtgtcacaatttacatttgatacgacattggctactaaaaatcagttcaatgcactgttacatggaccgagtctagcctatccgtttggtactgatgatttcggtagagatttatttacacgcgtagttgtcggaacgaaactgacattttcaatttcaattatttcagtagttattgcagttatttttggtgtgttactaggcactatcgcaggttattttaatcatattgataatttaataatgcgaattttagatgtagtgtttgcaattccatcattattgttagcggtggcaattattgcatcatttggagcaagtattccaaatttaattattgctttaagtatcggtaatataccatcatttgcacggacaatgcgtgccagtgttttagaaattaaacgcatggaatatgtagatgcagcacgtatcactggtgaaaacacttggaatatcatatggcgttatattttaccgaatgcgattgcgcctatgattgtacgtttttcattaaatataggtgtggttgtattaacaacaagtagtttaagtttcctaggacttggtgttgcacctgatgtagctgaatggggcaacattttacgtaccggtagtaactacttggaaacgcacagtaatttagctattgtacctggtatttgtattatgttcgtcgttttagcatttaattttataggtgatgcagtgcgtgatgcactagatccaagaattcattaaaaaggtagggatagatgtgaagaaaatcattagtatcgcaattatagttttagcgttggtattaagtggttgtggtgtccctacgaaatcagaagtggctcaaaagtcatcgaaagttgaagtgaaaggcgagcgaccaacgatacatttcctaggacaagcaagctatgaaaatgatatgaatatcgttaaagatcaattggaaaatgcaggatttaacgtgaagatgaatatccaaccagattatggtagctatcgtacacaacgtcaagccggcaattatgatatccaaatcgatgactggatgacagtattcggtgacccgaactatgctatgacggcattatttagttctacaggatcaaatagtttattgaaagataaacatgtagaccagttgttaaataaagcttctactcaaaatgaagcagatgttaaacaaacatataagcaaattgaagatgaagttgtatttgataaagggtatatggcgcctttatatggatcaaaaaagaatttagtatatgacaataaagtgttagataaaaatagtgttggattgccaaattcacgtgcattaatatggcaacaatttgattacaacaatagtagagaacgagatacgcggccacttgtgatgacacaacaagatggtgaaattcctacattggatccaatacgttcaattgcgccgtcagtatattcaattaatatgaatatgtacacaaggttattattattagatgaaaatgaccacttaacaacgaaaggttcgttaagtcgtgattatgctgtgaataaggacaataaagcattttatttcttgttaagagatgatgattattttgcgaaagtggtcaatggacaagcacgtaatactggagagcgtgtatcggctgaagatgttaagttttctttagatagagcacgtgataaaaagtctgtgcctaacaataatacttacaatatgcacaaacatataaatgacatcaagatattaaaagatgaggacatcgatcagttgcgtaaagagaaagacaaggacgataaatccatctatgataagttgattaaagcttataacgtcaaatcgttaacgacagatggtcaaaaagtaaataataaagacggtatttatcaaattgttaaaattacgacagatcaatcgatgcctcgagaggtaaattacttaacacactcttcggcaggcattttatctaaaaaatttgttaatcaagtaaatcaagaatatccaaaaggatatggggatagcagtacaattcctgcaaattcagatgggaaaaatgcgctgtatgcaagtggcgcatacattatgacacagaaaaatgcatatcaagcaacgtttcaacgtaatccaggattcaacgaaacagaaaaaggtagttatggaccagctaaaattaaaaatattacattgaagtttaatggtgacccgaataatgcattgtcagaacttagaaatcattcaattgatatgttggcagatgtgaatcaaaaacattttgatttaattaagtcggataaaaatttaagcattattcgcaaaaatggacgcaagtcagtctttttaatgctaaatattaaaaaaggtatatttaagacgcatccaaacttgagacaagcagtagttaatgcgatagatcaggatcaatttattaagttttatcgtggcgataaatttaaaattgcatcaccgattacaccacttgtcgatactggtaacgagcaacgtcaagatttagaaaaagtagaaaaagccattaatcaataatgttttaaatatttaacagaaagtaggaggatatagtatggtcattaacttaaatgacaaacagacaaaaacatctaaagaagggttaatttccgtatcacatcctcttgcggctaaaattggtaaggatgtattagatcaaggtggcaacgccatggatgcagtgattgcaattcaactggcattgaatgtggtagagccatttgcatcaggtattggtggtggcgggtacttgctatattatgagcaaagtactggcagtataactgcgtttgatgcgcgtgagacagcccctgcacatgtagacaaacaattttatctagatgattcaggcgaatataaatcattttttgatatgactacacatggtaaaactgtcgctgtgccagcaattccaaagctgtttgattatattcacaagcgttatgctaaattgtcattggaagatttaattaatcctgcaattgaactagccattgaaggtcatgcagccaattgggctactgaaaaatattcacgccagcaacacgcacggttgacaaagtatcatgaaacggcgaaagtctttacgaatgaaaatcaatattggcgtgaagatgattggattgtacaaaccgaattaggtaagacacttcaaatattaagagagcaaggatttaatgcattttataaaggtgacattgcgaaacaactagttaatgttgttaaagcatgtggtgggacaatcactttagaggatctagcaaattatgacattcagattaaagcgccaatcagtgcgacatttaaagactatgacatttattcaatggggccatctagttctggcggtatcacggtaattcaaatattgaagttattagaacatgtcgatttaccatctatgggtccaagatctgttgattacttgcatcatttgatacaggcgatgcatttagcatatagtgatcgcgcgcaatacttggcggatgataattttcatgaggtgcctgtacagtcattaattgatgacgattatttaaaagcacgcagtaagctcattgatagcaataaagcaaatattgatatagagcatggtgttgtgtctgattgcattagtcatacagatgttgaagaaaatcataccgaaacaactcatttttgtgtgattgataaggaaggtaatattgcttcatttacgacatcaatcggtatgatttacggatcgggtatcacgattccaggctacggcgtgttattgaataccacaatggatggttttgatgttgtggcgggtgggatcaatgaaattgcaccttataaacgaccactaagtaacatggctccaacgattgtgatgcatcacgggaagccaatattaacagtaggtgcacctggtgctataagtatcattgcaagtgttgcgcaaacattaatcaatgtattagtgtttggtatggatattcagcaggctatagatgaacctagaatttatagtagccatcctaatcgcattgaatgggagcctcaattttcacaatctacaatattagcattgattgcacgtggacatgcaatggaacataaaccagatgcctatattggagatgtacatggactacatgttgacccaacaacgtatgaagcttcgggtggcagtgatgatactagagaaggcaccgtaatgggtggcgaggtgttagtgattagaaaacagccattaccatatcggcaaatgtatgattgtaatgtatatcgtgtatatttcaatgatgtgcagttacctttattggcagatcaagtgcgatggatgcatgacaaatattgggttgatgaaagtgtcgttagaatcatcttctctgaagttagtgcacatattgaagatttaagaagttatgaaaacgcaggagaaaattatatagatattgcctggttagcacgaaagaaaggttatcaagtaacattgaaggatgacggtttatacttaactgatgatacatatacttcagtgaaacggaacacaaatgcgtactatagatatgatcgagatagtatcacaagatagtttatacgcttgatatgaaatttgtagtggataagggcttttgttgaaagaaaggattcgatttcgaactttagcgtgacgcttgagtgtagtaatgttggaaatgctatacgaaacgctagtcacctttgtaaattatacaacgcctcacaaattcgtttttgatgtacattacaatagttagtctaaaatctaatgtgatgtggtttggtacagttgaacgagttatgtgaggtgtttttataatgtgggattttagaatgttaaatgctaataaatgatttggatatttttatagttacatcataaatattaatgttcacttattttattataagtaaggctttctttataaatgatttggtcttttccaggacttgaaaaataaaaataaagtttctgatcttgatgattattgccttttaaatcactcattccctttaattccacctttgttgatgcattttggggaatattatatctacgttttaattgtttaacgtttggattatcattcgacaacttaccagataaattataataatcagtggtaggatcatgtgtgactttcaaatcattgctatttaaaatgcttgttaaatcaccattttgaatcaaaaattgattgttttcgattttttgtttcagcgcgggatcttttacgtcttttgtgaaaacgattttattattaactacttttactggataacttttgtatgtcgagtcagtagcattttttctatcgtttgtagttgtgtcatattcaccagttattttatgtgtgttcttatctacctttaacaacatacggtcttcttttaaaagctcatctgatccaacaactgaataagaggattctatataccatgtgtcttgatcattattttcataatggggattatcgtgaccatcaatttcataaagcgtttctaagtttttaataggatatgtacttagtacttttttaaggccatctttcaaatgaatttgttcccacttcattgccaaaaacataccgccactgactacaattgaaataataataattgctgctaagtttaaccagaaaattttatacgctttcatacattcccaccgtttcttaaaatacttcattaacattataataatatattttaaaaaatatttacatcagtattaaagtgaatatcaaattttaaatttatgaaaataatagatatttataaaaaaacgggaaaggtatacaataaaaaacactgtatgacgtttgatcagtcacacagtgtagataacaattaaaatgttgttgccaatttttcagcattattaatactagttgctttaatttcttcagtcttatgaggttcggcattgtggccttcgataatgattgtttcatatgatggcacacctaagaatgtcataattgttcttaaataacgatcacccatttcaaaatcagcagcagggccttctgtataatagccaccacgtgattgaatgtgtaatacttttttgtcagttagtaaaccttgtggtccttcagcagaatatttaaaagttttacctgcaattgaaattgcatcaatatatgctttaactacaggtgggaaagaaaggttccacataggcgttacaaatacatatttatctgcacttaaaaattcttctaaaatgtcactcaatcttgaaactttcatttgttcatcatcagttaacggttcgccattactcattttcccccaaccagttaatacatctttgtcaataactggaatataagtttcaaataaatcaatatgtttcacttcatcttcaggatgttgttgttgatatgtttcgataaatgctttaccagccgccatagaatttgataccagttcattaaaaggatgtgctgtaatatacaatacttttgccatttgaaaattctcctctgtttctgttattttcttaagtataattattatactcgatataaaatttaatatcaatcaaaatattcaaattaccatcattttcttcatctatatttggcagtactactaaagtatgagtgcatttaattatgaaatagttgatttagaatatatacttaatacccaaaatatatgaaggatggatgccactatgacaaagcgaccaaaacgtattttggcaacaattatcatttttctttcactattatttacgattatttatatagatgacattcaaaaatggtttaaccaatataccgataaattgacacaaaatcataaaggaaaaggacactcaaaatgggaagacttttttagagggagtcggattactgaaacttttggtaaatatcagcattcaccatttgatggtaagcattatggcattgattttgcattgccaaaaggtacaccaattaaagcaccgacgaatggtaaagtaacacgtatctttaataatgaattaggcggcaaggtattacagattgccgaagacaatggagaatatcaccagtggtatctacacttagacaaatataatgtcaaagtaggtgatcgagtcaaagcaggtgatattattgcatattcaggcaatacaggtaaacaaacgacaggcgcacatttacattttcaaagaatgaagggtggcgtaggtaatgcatatgcagaagatccaaaaccgtttatcgatcagttacctgatggggaacgtagcctatatgatttgtagttatagaagagtgcccgcagtctaaaaaattaagcaattattatgtgagtagaatgcttacataatggttgcttttttcaatgaaaatcgaaatgctaagtcatacttgtttgatttagatattactacaaaaatgtaagacaaggttgttagcattggcagtgaaatttcgcacgtaaaaaaatcatcattgtcacactaaaaatagttgtgcgctatatcaattttctgtataaaagtttaattctgacagtaatgtaaacgtttacaatttatgattgacattaataataagtgactatatgatttatgtaagtatttgtgcaaacgttttcacaaagtgtattgcacaatcaaattgtaaacaaagtatgggaggcataacatggcagaattaaagttagagcatattaaaaagacgtatgataacaacaatactgtagtgaaagattttaatctacatattactgacaaagaattcattgtatttgttggaccatcgggatgtggtaaatcaacaacattacgaatggttgctggactagagtctatcacatctggagatttttatattgatggggaacgcatgaacgatgttgaaccaaagaatagagatattgcgatggtatttcaaaactatgcattatatccacatatgactgtttttgaaaatatggcatttgggctaaagctacgtaaagtgaataaaaaagagattgaacaaaaagttaatgaagcagcagaaatattaggattaactgagtatcttggtcgtaaaccaaaagcgttatctggtggacagcgtcaacgtgttgctttgggcagagctattgttagggatgcgaaagtctttttaatggatgaaccattatcgaatctagatgcgaagcttcgagtacaaatgcgcacagaaatattgaaattacataagcgacttaatactacgacaatttatgttacacatgatcaaactgaagcattgacgatggctagtcgaattgttgttttgaaagatggcgacattatgcaagtcggcacacctagagaaatatatgatgcccctaattgcatatttgtggcgcaatttatcggctcaccagcaatgaatatgttgaatgccacagttgaaatggatggattgaagataggaacacaccattttaaattacataataaaaaatttgaaaagttaaaagctgctggctacttagataaggaaattattttaggtattcgagctgaagacattcatgaagaaccaatatttattcaaacttctccagaaacacaatttgaatctgaagtagttgtatccgaactgttaggttcagaaattatggtacatagcacattccaaggaatggaaatgatttctaaattagattcaagaacacaagtgatggcgaacgacaagattacactagcatttgatatgaataagtgtcacttttttgatgaaaaaacaggaaatcgtatcgtctaagggggagtattcatgtctaaaattataaaatgtatcacgttagccgtggtaatgttattaatcgtaactgcatgtggccctaatcgttcgaaagaagatatagataaagcattgaataaagataattctaaagacaagcctaaccaacttacgatgtgggtggatggcgacaagcaaatggcgttttataaaaaaattacggatcaatatactaaaaaaactggcataaaagtaaagcttgtaaatattggtcaaaatgatcaactagaaaatatttcgctagacgctcctgctggaaaaggtccagatatctttttcttagcacatgataatactggaagtgcctatctacaaggcttagctgctgaaatcaaattatcaaaagatgagttgaaaggtttcaataagcaagcacttaaagcgatgaattatgacaataagcaactagcattgccagctatcgttgaaacaaccgcacttttctataataaaaaattagtgaaaaatgcaccgcaaacgttagaagaagttgaagctaatgctgccaaactaactgatagtaaaaagaaacaatacggtatgttatttgatgctaaaaatttctattttaattatccgtttttattcggcaatgatgattatattttcaagaaaaatggcagtgaatatgatattcatcagctaggactaaattcaaaacatgtcgtcaagaatgctgaacgattacaaaaatggtacgacaaagggtatcttcctaaggcagcaacacatgatgtcatgattggtctttttaaagaaggaaaagtaggacaatttgtcactggaccgtggaacattaatgaatatcaagaaacgtttggtaaagatttaggagtaacaacattgcctacagatggtggcaaacctatgaaaccatttctcggtgtacgtggttggtatttatctgaatatagtaaacataagtattgggctaaagatttaatgctgtatatcactagtaaagatacattacaaaaatatacagatgaaatgagcgaaattactggacgtgttgacgtgaaatcttctaatccaaatttaaaagtgtttgaaaagcaagcacgtcatgctgaaccgatgcctaatatccctgaaatgcgacaagtttgggagccgatgggcaatgcaagcatatttatctcaaatggtaagaatcctaaacaagcgttagatgaggcgacgaatgatataacgcaaaatattaagattcttcatccgtcacaaaatgataagaaaggagattagttatgaagaaacgtaaccctaaattagcggcattattatctgttatacctggtttgggacagttttataataaaagacccattaaaggtacgatattttttatctttttcatcagctttatttctgtattttatagctttttaaatattggtttttggggattgttcacattagggacagtacctaagttagacgattctcgtgtcttacttgcacaaggtattatttctatcttactcgttgcttttgcaatcatgctatatgtcattaatattttagatgcatatcgtaatgctgaacgatttaatcgcaatgaggaaataaaggatccgaaggcacgtatggttgcaacatgggacaagacgttcccatacttactaatctcaccaggtacattcttattgatatttgtagttgtatttccattaatatttatgtttggagtagcatttacaaactacaatttatacaacgcgcctccgagacacacattagaatgggttggtttagataactttaaaacgttattcacaattggcgtttggcgtaaaacatttttcagtgttattacttggacattagtatggacgcttgttgcaacgacacttcaaattgcattagggctgtttttggcaattattgtaaatcaccctgtcgtcaaaggtaagaaatttttccgtactgtgttaatcctaccctgggctgtaccatcatttgtgacaattttaatatttgtagcgttatttaatgatgaatttggtgcgataaataatgatatattgcaacctttattaggtgttgcaccagcatggttaagtgatccattttgggcaaaagtggcattaattggcattcaagtatggcttggtttcccatttgtctttgcactgttcactggtgtactgcaaagtatttcatcagattggtacgaagcagcagatatggatggtgcgtctagttggcaaaagtttagaaacatcacattcccgcatgtcatttacgccacagcgccattgttaattatgcaatatgcaggtaatttcaataattttaatcttatttatctatttaataaaggtggtccaccagtgtcagggcagaatgctggtagtacagatatcttgatatcttgggtgtataatctgacatttgagtttaacaactttaacatgggtgcagttgtgtcattaattattggctttattgttgctattgtcgcatttattcaattcagacgtacaagtacgtttaaagatgagggaggtttataaggtggcaaagaagaaaaacatattaaaagcaatcggtatttatagttttatagcgatgatgtttgtcatcattttatatccactactgtggacatttggcatttcccttaatccaggtacgaacttgtatggtgccaaaatgataccagacaatgcaacatttaaaaattatgcattcttactattcgatgacagtagtcaatacctgacttggtataaaaatacgcttatcgtagcatctgcaaatgcactgtttagcgtgatatttgtcacgttaacagcatatgctttttctagatatcgctttgttggtcgtaaatacgggctgattacatttttgattttacaaatgttccctgtattaatggcaatggtcgcaatctatattttgctaaatacaattggattattagattctttatttggactaacactagtatatattggtggatcaataccgatgaatgcctttttagtgaaaggttacttcgatacgattccaaaagaacttgatgaatctgccaaaattgatggtgcagggcatatgcgtattttcttacaaattatgctaccgctcgctaagccgattttagcagttgttgctttattcaattttatggggccatttatggactttatattacctaaaatactattaagaagtcctgaaaaattcacattagcagttggattgttcaactttattaatgataagtatgcaaataatttcacagtgtttgcagcaggggcaattatgattgcagtacctatagcaatcgtattcttgttcttgcaacgctatttagtatcaggtttaacaacaggtgcgacaaaaggttagtttgaaattaggagcggggcagaaatagtaaagaaccactaatgaatttattgtgtagtggctcttacaaactagccacagctaatatgtacctaaaaataggaatacatgagtaaaactcatgtataagaaatactaatttctaaagaaaaagtatttcttatgttgagggctcaccaatataacattgtatagcctagaacgttgattgatgtttaaggctcgacatacgcactaatgacgataaagatttaaaggaggacgttatgatgacgattaaagttggaatcattgggtgtggtggtattgcgaatggcaagcacatgccaagtttacaaaaagttgaaaatgttgaaatgactgcattttgtgacgtagacatttcgaaagcagcgtgtgcggcagaagcatacggtactgacaatgcaaaggtttatgatgattacaaagcattgttaaaagatgacacgattgatgttatccatgtttgtacgccaaatgattcgcattgtgaaattactgtagcaggattgcatgccggtaaacatgtgatgtgtgaaaaaccaatggctaaaacgacagcagaagctcaaaaaatgatagatacagctaaatcaacaggtaaaaaattaacaataggttatcaaaatcgcttcagagcagatagtcaatttttatataaatcagcgcaacgtggcgacttaggtgacatttatttcggaaaggcacatgccattcgtcgtcgagcagtaccaacatggggtgtctttcttgatgaagaagctcaaggtggaggaccattaatcgatatcggtacacacgctttagatttaacgttatggatgatggataattatgaaccagaatcagtgatgggttcaacattccataaattaaataaacagcatgatgcggcaaacgcatggggttcatggaatccagatgaatttacagttgaagactctgcgtttggctttattaaaatgaagaatggagcgacgatcattttagaatccgcttgggcgattaattctttagaagtggatgaggcaaaatgttcattatcaggaacgaaagcaggggctgatatgaaagatggtctacgtattcatggtgaagatatgggcacactttataccaaacacgttgaattggaaaacaaaggcgtcgacttttatgaaggtaatgaagtggatgaagctgaagaagaagcaaaagcttggattgatgcagttgtaaatgatactgaaccagttgtgaaaccggaacaagcaatggtagttacaaaaattcttgaagcgatttatcagtctgcaaaatcaggcaaagcaatttactttgaataacatcatacggtaaggaggcacatcatgacaaaattaaaagttggtgtgataggtgttggtggtattgcacaagaccgtcatattccagcattgctgaaactcaaagacacagtctcgttagttgcagtacaagatattaatacagtgcagatgattgatgttgcgaagcgctttaatatacctcatgcagttgagacacctagcgagctgtttaaacttgttgatgcggtggtcatttgtacacctaataaattccatgctgatctttctatagaagcattgaatcatggcgtccatgtattgtgtgaaaagccaatggcaatgacgacggaagaatgtgatcgcatgattgaagcggctaataaaaatcacaaattattaactgtcgcatatcattatcgccatacggatgtcgcaattactgctaaaaaagcaattgaatcaggtgtggttggtaaacctttagtagcacgtgtacaagcgatgcgtaggcgtaaagtgcctggctggggcgtttttactaataaagcgttgcaaggtggcggtagcttaatcgattatggttgccacttgttagatttatctttgtggctactaggtaaagatatggtgccgcatgaagtgctaggaaaaacatataatcaattgagcaaacaaccgaatcaaattaatgattggggaacatttgatcacactaaatttgatgtagatgatcatgttactagttatatgacatttgccaatcgagcaagcatgcagtttgaatgttcgtggtctgcaaatataaaggaagataaggtacacgttagtttatcaggcgaagatggcggtatcaatttatttccatttgaaatatatgagccccgctttggaactatttttgaaagcaaagctaatgttgagcataacgaagacattgctggtgagagacaggcgcgtaactttgtcaatgcgtgtatagggatagaagagattgtcgtgaaaccggaagaagcacgcaatgtcaacgcccttatagaagcgatttatcgtagcgatcttgataacaagagcatacaactttaatgattattatatataatacaaaattctcaatataaaaagaaggagtgcttttcaatgaaaataggtgtattttcagtattattttacgataaaaattttgaagatatgttagattatgtcgcagaatctggattggatatgattgaagttggaacaggtggtaacccaggagataaattttgtaagttagatgagttgttagaaaatgaagacaagcgacaagcatttatgaagtcaatcacagacagaggcttacaaataagtggtttcagttgtcataacaatccaatttctccagatccgatagaagcgaaagaagccgatgaaacgttacgtaaaacaatccgtttagcaaatctattagacgtgccagttgttaatacattttctggcattgcaggatcagatgataccgctaaaaagcctaattggcctgttacaccttggccaacagcctactctgaaatttatgattatcagtggagtgaaaagttgataccatattggcaagatttagctgagtttgcaaaagagcaagatgtaaaaattgccatagagttgcatgcaggatttttagtgcatacaccatatacgatgttgaagttgcgtgaggctacaaatgaatatatcggtgctaacttagatcctagtcatttatggtggcaaggtattgacccaattgctgcgattcgcatattaggccaagcaaatgcaattcatcacttccatgctaaagatacgtatattaatcaagaaaatgtaaatatgtatggtctaactgatatgcaaccatatggtaacgttgcaacaagagcatggacattccgtacagttggttatggacatagtccatatgtatgggcagatatcataagtcaacttattattaatggatatgattatgtattaagtattgaacatgaagatcctattatgtcagtagaagaaggtttccaaaaagcttgtcaaactttgaaatctgttaatatttacgacaagccagcagacatgtggtgggcataatacgaactcgaggttagtctgaagtttgtctgaagtaagactggtggcagtgttgaataaatgcatatgtcgccatgccattgccaaaaatttcacaccttaaattaagtcattgtttgtaaagaaggtgtactttatataagtatatagcgatggtcatacccatttacagtaacaatcctcaccattgaaaagagtatataaccttttcaatggtgaggtatatgataataaaaaagcctgttgtcacaatggtcatagacacgacatactttaaaggtttctgaatataatatatcagaacgcactttaaagatggacgtcgatgtcgactaatgtgatgacaggctttcatttttaaatattcattaatttttcttcttgtttaatacgtacatataagaaatacgcatacggtactaataaaatagttgtatatgttgcgtgtgttaataataatacaccgattaattcaggaataatatttaagaagtaatttgggtgttttgtaattttatataatccagatttaataataggatggttaggtaaaatgaataattttaatgtccaaataccacctaaagttttaataaccataaataacatgatataagcaaagattaatataactaagccaataccatttgcaaagctaaatgtatctttattaataaatgcctctacaccagccaatacataaattaaaacgtgtgtcattgctaaaaacttcgaatttttaacgccatattcaactgcaccgtctgcttttaattgttttgagtgattaatagatatctttaagctgacaagtctgatacagaaaaagataagtaatatagatagaatcatgatgtcctccgtcattatgtcatatgtataagcgttgattttgacaacataaagtattttatagataaaacttgtcaaatactattaactatttattaattttagtacataaatatgtttctaagtatgtgtttatgttcagtattttggataatttaataattttaaggatattaagcgcttacaccgacgtgatatatttggcttaacgaaaatgattgaggtgacagagatgaacttttttgatatccataagattccgaacaaaggcattccattatcggtgcaacgtaaattatggcttagaaacttcatgcaagctttcttcgtagtgttctttgtttatatggctatgtatttaattcgaaacaactttaaggcggcacaaccgtttttaaaagaggaaattggattatctacattagaacttggttatatcggattagcatttagtatcacgtacggtttagggaaaacattacttggatattttgtcgatggacgtaacacaaaacgtattatctcattcttacttatcttgtctgcgattacagttttaattatgggatttgtgttaagttactttggttctgtaatgggattattaattgtactttggggacttaacggggtgttccaatcagttggtggacctgcaagttattcaacgatttcaagatgggcgccaagaacgaaacgtggccgatacttaggtttctggaatacatcacataatatcggtggtgccattgcaggtggtgttgcactttggggtgctaacgtattcttccatggaaatgttatagggatgttcattttcccatcggtgattgcattacttattggtatcgcaacattatttatcggaaaagatgatccagaagaattaggctggaatcgtgctgaagaaatttgggaagagccggttgataaagaaaatattgattctcaaggtatgacaaaatgggagatctttaaaaaatatatcctgggaaatcctgttatatggattctatgtgtttcaaacgtctttgtatacattgtacgaatcggtattgataactgggcaccgttatatgtgtcagagcatttacactttagtaaaggcgatgcagttaatacgatattctattttgaaattggtgctttagttgcaagtttattatggggctacgtatcagacttattaaaaggtcgtcgtgcaattgtagctattggctgtatgtttatgattacatttgttgtcttattctacacaaatgctacaagtgtaatgatggttaacatttcattgtttgcattaggtgcattaatctttggtccgcaattattaattggtgtatcattgactggttttgttcctaaaaatgccatcagtgtagcaaacggaatgacaggttcattcgcgtatctattcggtgactcaatggcaaaagttggtttggcggctattgctgatccaacacgtaacggtttaaacatctttggatatacattaagtggatggacagatgttttcatcgtcttctatattgcattattcctaggcatgattttattaggaatcgttgctttctatgaagaaaagaaaattagaagtttaaaaatctaatatcaatcggattaaaagtatcgccaatttattgcagtatagttggcaatcctgccccgacggcatgtgcgtgaagagatgaaagatactgcttctacccttgcaaatatatcatctctatgtctcggggcagatcataattccctgttatgaagtatccttatttgcccgacttagggtgactcaatgaatttactccttacaataaagacatatagcggtgtcaatattgtagggagtattgttttatatttaaactctctaaaaagcggactgaaagaaaagtgaaaacttctctagcagtccgctttttcatagaacaaaatggatgtgccataatcattagttatttgttaatctattttgcttgcttacaataatcacttggcgacatttgtaaatattttttaaaatgatagctaaacattttatactctgaaaagcctactttgtctgcaatttcatagtgcttataatgtcgatctaacaattgcagagattgtaaaatacgatagcgatttaaataatcgacaattgtaataccaacatgatctttaaatgttcgcatcgcatacgattcactaacatcgatatgttgaattaaatctgaaacagtcactttcgtttgataagattgcttaatttgatcaacaatctgatttacataataatcatcgtattctacttttaataatggttggaaggcatcatgacaagatgctaagctacggccgttctgtgattgttgctctaataaggtacgaacaagtcttcctaaaataacttctaattgtgcatggtctactggttttaataaataatcaagaacatgatgttgaatgccggctttcatatattcaaagtcatcgtaactcgataatatgatgacattacaatctagatgcgcaatatcattgagtaaatcgacgccatttttacgtggcatacgaatatcagtaattactaattctggctgatgttgttgaattagtgataatgcttcaacaccatctttagcagtgtatattgtattgaaatgatagtctccccaaggaatgatttgctttaaaccttctcgaataattcgctcatcatcacaaataactaccttaaacatctacattcccccttgaaagtggtattttataacaaattaacgtaccttgattacgctttgaaaaaatatggagtcgtgcatgtgaaccatattgaatcattgctttattgtgtaaatgatttaatcccaaatgcttagtatcaaatacatcattattaagagattggcgtacatattgcaggcgagatgacgacatcccaataccattgtcgcaaactaaaacatgtaaattctgacgtgccaatgtcaggcgtatagtaatgtctagtgactcagtatctctaccatgtttaatagcattttctatgagtggctgaagcatcattttaccaattgtctggtgacgcgcttcttcagaactttcgatatggagcttaatcatgtcatcaaaacggatgttttgtatcgcaacatactgttcaatgtagttcaactcttcgtttaattccactgtatgtgagtttgtacgtaatgagtaacgtaacatttgcgataattgttggaccacagtttgtgctaatttcggagataacgtaattaaatattgtattgtttgcatcgtattgaataggaaatgaggttggaattggcgttctatttcctttaactgaatatcacgcaagcgacgttctgtatgctcaatagaatggatcagttgctcatttgattcaaataaatcgtaaatataattattaatttcttctagttcactgttgttttttaaaggcgtatatgtacctagatgacgatttttggcatagtaaattttttgaataatcgtttcgatatcttttgtttgtcgtttagccatattatctgcgctaatgaaaccaaatattactagtaaaacaagaactacggccataacaattaacaacgtgataccatcttcaatgttttcatgtatatctttataaataatgagacgatggtcagcacggtttaattttacagattcattcataaatccgaattgttgtggtctatacttttcgcctatagtaaaacggtcatcgttggcgtataaaatattgtcatattgatcaacgataagtgcgaattgtcggttatctttcttaatttcacttaaacgtggggtgttagccatataaattttaagcatatatgtactatttttgaatttaagctgatgcgttgaaaataaatacatatttttagtgtttaaatgttcataattattggttataaactgatttggtccagataattcataataaagtgttgcgggctgttggtgtattaattttaataattcacgttttgtagcggtaacatcatgatgatttgttaaatcgagctcttgaaacgaattattatgctgtgtaataaatgtctgaatctgcttttcagtgtgatgtaaagataactgactttcatcaacatgttgatgaatcgtacgatgctcaatccaaatatagatggcatagaagcttactagtccaataataatgactaaaaatactggaaaaatagtagacgcaaataacgatcgtctcaattgatgtctataaggtttgtatgccgtcattgaatcatctccaaaaatttatgatgtggaatgtccggtaatttagatttcggtattaaaggtatgttcttaagattttcgatagactgatcgctttgttcactaacatcctttcgaattgacttggcatcgaactctgcaactaatcgttgttgtactgagcggcttgttaaatattgcactaactttttacgcttaggatgagggtgtgcatttttaactaaagcaataccatcaacatttaacattgttccttcaattggataaacgattgatacaggataacctttgtttttccatgtgcgtgcatcttgttcgtagcttagacctgcgtaatatttaccttttgcaacatcttcaatgactttagacgtctttgacagttgcatcgcatggttttggaattgatgcacatcacttactcgatgatgcatgctataaatagcacgcatatgttgatagcctgtcgttgttgtatttggatttgagtacgcaattttacctttaagtataggttgtaataaatcttgataacctcgaatcttaatatctccttgtaaatctgaattaactactataactgttggcattaatagaaaactagtaacatatttattgttcgagcgataatcctctaattgctgtgttacagatgtatcttgatagggaacaaaatcttctggatgatcaattgtttctgacaacacaccacccataaatacatcaccacgctccgaaagatcttcattatgcaagtttgaaagcagtacttgagtagatccgtgtttaatttcaattttgacatgctcttgtttttcaaaatcatttaaaattggacgaatcaagtttgattgatacggagaataaactgttaatacatttttatctgattcagagtgacgcgtattagcgcatgctgataaaaaaatgagaaataatagtaagatataaatttttgatttcatgatatcccatcaattctatgtatattttaatacaataattttagcaataaatgacgcataagtaatgttaaatatttagaaatgtttatagatgacttgttaagacgttgcaaatgttgtgatagcacataatttttgtttgtcaagacgacttaccgaagctgtaaaatcaaactgttatattttatttgtagctgttatataaaaattggcaagatattgaatggttcaaaagtaaatttttacgtcaataaaagtatttaatcctgtctcttcatatataaaagtaaatctttctaagtattgatttaacgcttattaacaatcattttttataaaaaaatatatccacctaaattaacttttaaagcaatgaaaatagtgaacattataactgttgtgtaacagaatgcaattagcatattactgttacacaaattagtacagtttctatgttttgacatacatttgatgaaaattgtacataatttatgtgaaaaaaatcacaacaaacatgctacaatgactatgaaaacgttaacatagcatttcaaattcacaacattatacagatggaggcgtttagtatgttagaaacaaataaaaatcatgcaacagcttggcaaggatttaaaaatggaagatggaacagacacgtagatgtaagggagtttatccaattaaactacactctttatgaaggtaatgattcatttttagcaggaccaacagaagcaacttctaaactttgggaacaagtaatgcagttatcgaaagaagaacgtgaacgtggcggcatgtgggatatggacacgaaagtagcttcaacaatcacatctcatgatgctggttatttagacaaagatttagaaacaattgtaggtgtacaaactgaaaaaccattcaaacgttcaatgcaaccattcggtggtattcgtatggcgaaagcggcttgtgaagcttacggttacgaattagacgaagaaactgaaaaaatctttacagattatcgtaaaacacataaccaaggtgtattcgatgcatattctagagaaatgttgaactgccgtaaagcaggtgtaatcactggtttacctgatgcatacggacgtggacgtattatcggtgactatcgtcgtgttgctttatatggtgtagatttcttaatggaagaaaaaatgcacgacttcaacacgatgtctacagaaatgtcagaagatgtaattcgtttacgtgaagaattatcagaacaatatcgtgcattaaaagaattaaaagaacttggacaaaaatatggtttcgatttaagccgtccagcagaaaacttcaaagaagcagttcaatggttatacttagcatatcttgctgcaattaaagaacaaaacggtgcagcaatgagtttaggtcgtacatcaacattcttagatatctatgctgaacgtgaccttaaagcaggtgttattactgaaagcgaagttcaagaaattattgaccacttcatcatgaaattacgtattgttaaatttgctcgtacacctgattacaatgaattattctctggagacccaacttgggtaactgaatctatcggtggtgtaggtattgacggacgtccacttgttacgaaaaactcattccgtttcttacactcattagataacttaggtccagcaccagaaccaaacttaacagtattatggtcagtacgtttacctgacaatttcaaaacatactgtgcaaaaatgagtattaaaacaagttctatccaatatgaaaatgatgacattatgcgtgaaagctatggcgatgactatggtatcgcatgttgtgtatcagcgatgacaattggtaaacaaatgcaattcttcggtgcacgtgcgaacttagctaaaacattactttacgctatcaatggtggtaaagatgaaaaatctggtgcacaagttggtccaaacttcgaaggtattaacagcgaagtattagaatatgacgaagtattcaagaaatttgatcaaatgatggattggctagcaggtgtttacattaactcattaaatgttattcactacatgcacgataaatacagctatgaacgtattgaaatggcattacatgatacagaaattgtacgtacaatggcaacaggtatcgctggtttatcagtagcagctgactcattatctgcaattaaatatgcacaagttaaaccaattcgtaacgaagaaggtcttgtagtagactttgaaatcgaaggcgacttccctaaatacggtaacaatgacgaccgtgtagatgatatcgcagttgatttagtagaacgctttatgactaaattacgtagtcataaaacatatcgtgattcagaacatacaatgagtgtattaacaattacttcaaacgttgtatacggtaagaaaactggtaacacaccagacggacgtaaagctggcgaaccatttgcaccaggtgcaaacccaatgcatggccgtgaccaaaaaggtgcattatcttcattaagttctgtagctaagatcccttacgattgctgtaaagatggtatttcaaatacattcagtatcgtaccaaaatcattaggtaaagaaccagaagatcaaaaccgtaacttaactagtatgttagatggttacgcaatgcaatgtggtcaccacttaaatattaacgtatttaaccgtgaaacattaatagatgcaatggaacatccagaagaatatccacagttaacaatccgtgtatctggttacgctgttaacttcattaaattaacacgtgaacaacaattagatgtaatttctcgtacattccatgaaagtatgtaacaaaatttaaggtgggagcactatgcttaagggacacttacattctgtcgaaagtttaggtactgtcgatggaccgggattaagatatatattatttacacaaggatgcttacttagatgcttgtattgccacaatccagatacttggaaaattagtgagccatcaagagaagtcacagttgatgaaatggtgaatgaaatattaccatacaaaccatactttgatgcatcgggtggcggtgtaacagtcagtggtggcgaaccattgttacaaatgccattcttagaaaaattatttgcagaattaaaagaaaatggtgtgcacacttgcttagacacatcggctggatgtgctaatgatacaaaagcatttcaaaggcattttgaagaattacaaaaacatacagacttgatattattagatataaaacatattgataatgacaaacatattagattgacaggaaagcctaatacacacatccttaacttcgcgcgcaaactgtcagatatgaaacaacctgtatggattcgacatgtccttgtgcctggttattctgatgataaagacgatttaattaaactaggggaatttattaattctcttgataacgtcgaaaagtttgaaattctgccatatcatcagttaggtgttcataagtggaaaacattgggcattgcatatgaattagaagatgtcgaagcgcccgatgatgaagctgttaaagcagcctaccgttatgttaacttcaaagggaaaattcccgttgaattataaatacaattcagaccgaaaagaaagcatatgtaacttcaagagtgaaggggcatatgcttctttttcaattgagtatagagtattagcaagacgtagtaggtatatgagacaacttctacaatggttgaaggaagacgtttttgtaagtagctatgctgataaagaatgtgatgccttgttaaaggtggggttccaatatcatcgaatgggttattaattgctacttgcatatgaatatgagtcttttcaaatttttattgaccctgagtaatgaaaaatattaagatgaaacttaatattaaagcaatgcggagcgtgattatgaagagaattagtaaagatatatgggcagtatttaaattactgtatcaaaataaagggcgttttagcattaacgccttactattgcagttaatcatgatttttattagtagtacatacttaattttactatttaatatgatgttaaaagtagctgggcaaagccaacttacgattaacaattggatggaaatcgtaagtcatcctgccagtgtaatacttcttattatattcatattaagtgttgcttttctgatttatgtagagttttcattgttagtttatatggtttatgccggctttgatcgacaaattattacatttaaatccatttttaaaaatgcctttgtcaatgtgcgtaaactcataggtgtaccagttattttctttgtcatttatttaatgttaatgatacccattgccaacctaggactaagttcagtattaacaaaaaatatttacatacctaaatttttaacggaagaacttatgaaaacgacgaaaggtataatcatttacggtacctttatgattgctgtatttatcttaaactttaaattaatatttaccttaccgttaacgattttaaaccgccaatcgttatttaaaaatatgagactaagttggcaaattacgaagcgaaataagtttcgacttgttatagaaatagttatattggaactcatcattggtgcgattttaacattaattatttcaggagcaacatatcttgctatttgtgtagatgaagaaggagataagtttttagtctcctcaattttatttgttgtattgaaaagctcattgttcttttattatttatttacgaaattatcattaatcagtgtgttagtactgcacttaaaacaagagaatgtattagaccaaccgggcttagaatttaaatacccaaaaccgaaacggaagtctaggttctttataatttcaatggtgcttgcagtgacatgttttgtcggttataacatgtacttactttacaataatactatcaatacaaacatctccattattggccatcgtggtttcgaagataaaggcgttgaaaattcgattccgtcattgaaagctgctgcaaaagcgaatgtcgaatacgttgagttagatacaattatgacgaaagataaacaatttgttgttagtcatgataacaatttgaaacgtttaacaggtgttaataaaaatatttctgaatctaatttcaaagatgtcgtcggtttgaaaatgcgtcaaaatcgacatgaagcaaaacttgtatccttagacgaatttattgaaacggctaaacaatcaaatgtgaagctactagtagagttaaagccacatggtaaagaaccagcagattatacacaacgtgttatcgatattttgaaaaagcatggtgttgaacatcaatatcgtgtgatgtcattggattatgatgtgatgactaagttgaaaaaagaagcaccatatctcaagtgtggttatatcataccgttacagtttggtcattttaaagaaacatcattagatttctttgtcatcgaagatttttcttattcgccaagacttgttaatcaagcacacttggaaaataaagaagtctatacttggaccattaacggcgaagaagatttaacgaaatacttacaaaccaatgttgatggtattatcacagatgacccagcattagctgatcagattaaagaagaaaagaaagacgaaacatactttgatcgttctataagaatattatttgaataataaaaacaaagacctctaaagttatcaagataatactttcagaggtctttttaacgttgccatctatgagataggcaatcgtttcattcgtttataatcatatgacaagtatttgtaaggtaatttggcgtcacacacacttacatgatttattggtgaattattaattgttttgtgaatgcaaagggttagaaattgaatcgtaaatactttctaatctatgtttcgctttagtcatttgatccaaatttttagtgcgtatagcggattttgcaatatagtgcgcagctaaaatgtcgcgcttttgatatgcatctaaatttaggtacgataatttatttaagtcagtgtttactattaattcatgtaattgatctacaagcgcttgatgttgatacgtatgtgatgtagtttcagatttgcttgctaatttaataccagtcgtatcaaggagcgccgctttaataccagcaactaaatatgttttgattttcatttgtgttgtcatgctttgttactcctttgatgtacattaatcaaaaaaattatacactattgtatattgcaaagctaattaactataacaaaaagatagttaatgctttgtttattctagttaatatatagttaatgtcttttaatattttgtttctttaatgtagattgggcaattacattttggaggaattaaaaaattatgaaaaagcaaataatttcgctaggcgcattagcagttgcatctagcttatttacatgggataacaaagcagatgcgatagtaacaaaggattatagtgggaaatcacaagttaatgctgggagtaaaaatgggaaacaaattgcagatggatattattggggaataattgaaaatctagagaaccagttttacaatatttttcatttattggatcagcataaatatgcagaaaaagaatataaagatgcattagataaattaaaaactagagttttagaggaagaccaatacctgctagaaagaaaaaaagaaaaatacgaaatttataaagaactatataaaaaatacaaaaaagagaatcctaatactcaggttaaaatgaaagcatttgataaatacgatcttggcgatttaactatggaagaatacaatgacttatcaaaattattaacaaaagcattggataactttaagttagaagtaaagaaaattgaatcagagaatccagatttaagaccatattctgaaagtgaagagagaacagcatatggtaaaatagattcacttgttgatcaagcatatagtgtatattttgcctacgttacagatgctcaacataaaacagaagcattaaatcttagggcaaaaatagatttgattttaggtgatgaaaaagatccaattagagtgacgaatcaacgtactgaaaaagaaatgattaaagatttagaatctattattgatgatttcttcattgaaacaaagttgaatagacctcaacacattactagatatgatggaactaaacatgattaccataaacataaagatggatttgatgctttagttaaagaaacaagagaagcggtttctaaggctgacgaatcttggaaaactaaaactgtcaaaaaatacggggaaactgaaacaaaatatcctgttgtaaaagaagagaagaaagttgaagaacctcaatcacctaaagtttctgaaaaagtggatgttcaggaaacggttggtacaactgaagaagcaccattaccaattgcgcaaccactagttaaattaccacaaattgggactcaaggcgaaattgtaaaaggtcccgactatccaactatggaaaataaaacgttacaaggtgtaattgttcaaggtccagatttcccaacaatggaacaaaacagaccatctttaagtgacaattatacacaaccatctgtgactttaccgtcaattacaggtgaaagtacaccaacgaaccctattttaaaaggtattgaaggaaactcatctaaacttgaaataaaaccacaaggtactgaatcaacgttgaaaggtattcaaggagaatcaagtgatattgaagttaaacctcaagcaactgaaacaacagaagcatcacattatccagcgagaccgcaatttaacaaaacacctaaatatgtgaaatatagagatgctggtacaggtattcgtgaatacaacgatggaacttttggatatgaagcgagaccaagattcaacaagccatcagaaacaaacgcatacaacgtaacgacaaatcaagatggcacagtatcatatggggctcgcccaacacaaaacaagccaagcaaaacaaatgcatacaatgtaacaacacatgcagatggtactgcgacatatggtcctagagtaacaaaataagtttataactctatccatagacatacagtcaatacaaaacattacgtatctttacaacagtaatcatgcattctatgatgcttctaactgaattaaagcatcgaacaatcggaagcatatttctaaattacttattcattatagtcttaaacataacatgacctaatatattactaacctattaaaataaaccacgcacatctatgtgacatacgacaatcacagcaataataattgctttagaaagtcgtaccgaactggaacttacaagtctagttcgaacacacactgatgtgagtggttttctttattttaaacatgaacaatcagataagttactagtagtagcaaatattattaaatcaaagggcttcgattcataaaatttaaaacaatgattaaaattagacgtgtaaatgttaaattctaaaacggaaatacccgctatcctattaaaccactattttgttcgatcactatatttcacacagcttcaataataaaacgaaactgcttcaatctgcttcaacttcagcctacttcattcaataacaaaacgaatccgcttcatacaaaatcaaccattctaacgcacatactcaaatatagcagctgcacccataccgacaccaatacacatcgtaaccatgccgtaacggctatcgggacgtctacccatttcattaagtaaacgcgcggttaacattgcgcctgtagcacctaatggatgtcctaaagcaatagcgccaccattcacattcgtacgtgatatatctagccctacttctttaatagatgcaatcgtttgtgaagcaaatgcttcgttcaattcgattaaatcaatatcttcaacagatagattgctgagtgacaatacttcaggaatcgcatatgcaggcccaatacccataattttcgggtcaacgcctactgccttataaccaacgaatcgtgcaataggtgtcacgccgagttctttcactttatctccagacattaaaactacaaatcctgcaccatcagaaagtggggcagatgttcctgcagtcacagtgccgtcagctttaaatactgtacgtaatttggctaatgcctccatcgtggtatcaggtcgtataaattcatcttggtcaaagatatttgtgtgtacttttggtcctgcgtttgtatattcaactgagtttacttgtattggaataatttcatctttgaaccgaccatcacgttgtgcgtcataggcacgttgatgacttctgacagcataagcatcttgatcttcgcgtgatacgtcaaattgggatgctatattttcagcagttaaacccataggatatgacgcacctatatcatcatattgtaaggttggattgtttgtgggctcgttgccacccattggtacggcactcatcaattcaacgccaccagctacaagtatatctccttgaccagccataatttgattggctgcaatcgcgatggtttgtaatcctgatgagcagtagcgattcactgtttgacccggtaccgtgtcagataatcccgtacgcaatgcaatcgttcgtgcaatgttttgtccttgtaatccttctggaaaagccgtaccaacaatgacatcttcaatcatattcttattgaattttccgtcaatacgtttcaatacgccttgtaatactttggctgcgacatcatcaggtctttcgtggaataatgcgccttgctttgctttcgctgcggctgaacgcccataagctacaatgtatgcttcttgcatggttatcatcctctcttaatgactatcttttaattacgtaatggcttaccggtttttaacatatgcgcaattctttcatatgattttttagattttagtaagtcaataaagccaattttctccaacgattgaatgtaacgttgattgataaatgtatttcttggtaaatcaccacccgctaaaattgtggcgatatttaaggcgatatgataatcatggtcgctaataaaatgaccgcgtctttgcgcatctaattgtccttgaatcaacgctttgaagtcttcacctaaagcgatatattgatgtctaggattcggaatatagtttgtttctgcttcatatttcgcacgtttgagcgcaacttcgacacgttgtgttgtattgaaaataatcgtatctgtatcacgtaaataaccataacgacgtgcctcaaaggcatttgtagaggctttcgcaaatgcgatattcgtcagtacttttgtcatggaagcttgtttgtcatcaaacttatgcgatgtgcgtaatatgcgatcagccatttctgcaaggccaccgccactcggtaataagccaacacctgcttcaacaagaccgatatatgtttcacttgcagcgacaacaataggtgagtaaagtacaagctcacagccaccgcctaaggcacgaccttgaacagctgtgactactggtttcaaactatacttcaaacgattaaagctataatgtaatttatcaattgattgtgcaacgacatcatctacaagaccgtcttcatgagcctttttcattaagaaaaggttagcacccacactgaaattattaccatctgcataaataaccatacttgtgtaatgttcattttccagtaaatcaatcgcatcaactaacgcatcgttgaattcatcggtaatgacattatttttactttgtaatttcagtaacagttgattatcatgagttacggaaagtttggcatcacctttatcccaaagttcatcttttacgaagtgagaaacaggcgttgcatattcgatggtctcatcttgtttataaaagccaccgtctaaatcactaatccattgtggtaagtctccaagttcgtcttccatacgtgttttaacacgttcatatcccattgcatcccataattggaatggaccaagtttccagttgaacccccagacaagcgcacggtctatgtctcggaaatcatcggtagctttaggtacattgatggcagagtaatagaaattattacgtaatgtctcccataaaaatagtcccgcttcgtcttgcgcattgaatatgacatcaaggttatgcactacgtctttattaaattcatttaaaattggtaattgcggttgcgatacaggtacataatcttgtttttcaacatcgtaaacaagtcgagctttagtttctttatcctttttgtaaaatccttgtttcgttttacgtccgagtgcgccattttcaaacaacgtatttacaattttgacatcatgaaaataaggtgtttcttcaggtacttgttgcatgcctttaattactgacactgcaatatctaaaccgactaggtcagatagggcatatgtacctgttttaggacgaccaatcgcttgcccagttaaagcatccacatctacaatgcttaacttgtgttgctcggcgcgatacataatatcattcattgtttgcgtgccgactctatttgcgacaaagccaggcacatcattgacgacaatgacacctttacctaacacattttgcgcgaaattttttacatctaatatgatagattccttcgtgtgtgacgtaggtattaactccactaatttcataatacgtggtgggttaaagaaatgtagaccaaagaatcgttcttgatccttctcgttaaatgctttagcaatcgcattaattggaatacctgatgtatttgtagcgaataaagcatcttctttagcatgttgtagaacttgttgccaaacagcatgcttaatttcaatatcttctttgactgcttcgatatataaatcagcatcatcatttaccaagtcatcatcaaaattaccatatgttaaatgactcgctagatttaagtcgaatagaagcggccgtttcttatctgtaattttatcgtaagattttttcgcaatgagatttggatcgtttttgtccactacaatatctaatagttttactttaagtccagcattcacaaagagtgctgccagttgagcgcccattgtgcctgcgccaagaacggttactttattaattgtcatagtgattcctccaatttagttgaggataagataaccattaagataattggaataacgttgctattttataaaattaattaagtatctttgacagtcatcttagcctcttatttaaggaaaaagctttatgcttaaaataagtctttttttagtgatattactgcatctcatataattctttgctatttatacgaaagcagaatctccagtcaaagcgcgtccaattactaaggcattaatttcatgtgtaccttcgtacgtgtaaatcgcttctgcatcagagaagaaacgtgcaatatcataatcgtcagctagtatgccattaccacctgtaataccgcggcccatagctactgtctcacgcaaacgtaaggcattcatcatcttcgccgttgaagttgcaacctcgtcatattcaccatgtgcttgcatattagctaattgagcacatgttgccattgcttgagctaaattaccttgcatcattgctagcttttcttgtattaactgatatttactaattggtttgccgaattgcttacgctcagtgacataatctaatgtggcacgtaaagcgccagccataccacctgtagccatataggcaacgcctgctctcgttgaataaaggattttagcaatatctttaaagcttgttatgttttgtaagcgatccgcttcatctactttgacattagttaatttaattagtgcgttaggaacaatgcgaagtgcgattttattatcaataacttcaatattgacgccatcttgttctggtctgactacaaagcaatggggtttgccagtttctttatttactgcgaatactggaatgacatcagatacatgtgcaccaccaatccatttcttttcaccattgataacccaagtatcgccctggcgttcagcgactgtttcaagacctcccgcaacgtccgaaccgtgttctggttcagttaaagcaaagcatgtacgcagttcatgtgactgtaatttaggtacatatttcgcaatttgttctttgctacctccgaaatagaaagtgttatgccctaaaccttgatgaacaccgagtagggtagctaaggaaatatcaaatcgcgcgagtaggtaagacatgaaaaactgaaatagttgactaggcattttggcgtttggacgatccttgtaaagtaatggattgttaaaataatttaattctcccagatctttaaaatagtcctcgggtacagtagcgtctatccaatgttgattaatattttcacggtacttactttctagcaatgaatctacttgttgtaaaaattcgacttcaccgtctgttaaacctttagcaatactaagtacatcttcaggaaataatgtttttaagactgtttctttttcaaatgtcatataaattcctcctaaaaataatatgaatactaatgtgaaatgcatttaattcaaaaacaacacgcttcgcttgtaaacgcttacaaaaaatatcaaaaatttttaccacctttaaagtgtttgtgagactttgtcattcatcatttgtcgaatcgcaagtttatctggtttctgcgtactgtttaacggcatatgtgtcactggtacatacattcttgggactttataacctgctaaacgacttcgcatatgttggtctaaaatttcagcgtaatgaggttcatcttcgcgaagtataatggctgcagcaattgattcgccatattttggatgatcatagccaacgaccacacaccggtctattagtggatgctcagctaaagcattttcgacttcggatggtaagacattttcgccaccagttatgattaattcttttttgcggtcaataataaatatatcgccatcgtcgtccatcttcgctaaatctcctgtcaataagtaacgaccatgaaacgctttagcagtctctgctggtttattccaatatcctggcgtgacatttttagccttaattgcaagttcgccaatttcaccagtaggtacttcttcaccgttatcatcaaggatacgtgcatcaacaaacatgactgctttaccaatactcattggtttacgttttgaattttccggtgtattaacaagtacaagcggtgcttcagttaagccatagccgttaataatgtttatgccatattgtttaaaagctgcttggatacttggtaatggttgtgaaccaccttggatgatataatccatagctttaaaattttcaggattaaaattactagcacgtagcgtactataatacattgttggaatcatgataataaatgtagggtgatattgtgcaatcatgtcattcaattcttcgccattaaagtaacgttgaagaataagtgtgccacctgacattaatactggtaatacagtatcgttaaaccctaaaacatggaacattggtgttgatacaatcgtaatatagtttgaattgaacttatacgtcagctctaagtttgcgccgttatgaacaaatgattcatatgagaacatcacacctttaggtgatccagttgtaccacttgtataaattaatgctgcaagatcttgtggttcaacaggtgttgcttgaaaaggttggtgataatctggatttacgatttcatcatattgcgctacatcaatatccatatgcaataagttttggtcaatatcggtgagtgaacttaaatgtttttcagcatagaagagcagttttaattgtgcatcttccacaatagctgcaatttcttttgggttaagccgccaattcaatggtaaaaaaaccgcacctgttttaaaacaagcaaataataaatctaatattgcaatatcatttggcgcaaaaataccgataacatcgccttttttaacaccttgagatgttaaataatgtgccatattatcagcgcgtgcattgagttgttggtatgtccaagatgtttgttttgcgtgatcaataacggcaggcttgtcatcatcgaagtctgagcgcgtttttatccaatcgaaattcattagtataccccctttagcttcactttcatactttatgaattgattgtttaagttctccccatttttctttgtaaatgctggtatcaattaattttaaatgatcagcaataattggtttaaaagccatttgattcaaaatatctttatgcaaatcaagacctggtgcaatttcaattagtttcaagccttgattggtgagctcgaatactgcacgatcagtaacaaaatagacttcttgctcgagtgattgtgaatattgtgcattaaaatctatatggctcacatctgatacaaatttctggttttgtccttcagtttcaatgcttaatcgttgattatgacatgagacatgactgcctgctacaaaagtacctgaaaagataattttatttacagattgtgtaatgtctataaagccaccacatccatttagtcggccattaaagtaagacacgttgacattgccgtattgatcaacctcagcaaagctaagataggcaactgatacaccattgttataaataaaatcccatgctcgatcatgaggcatgcgcacatctgcattgtaattcataccaaaatgttcacgactcccaacgaatccaccgaaaatacctatgtctaaaatcggttgcacatcatgttcaacacattcttcatgcaataaattagagagttcattattgataccatagccaatgctaattgtatcgccataagttaaaaactgagctgcacgtctaagaatcagtttgcgactgttaaaaggtaatgcgggttcaggtattccatcaattcgttcttctccagacaaggctggtaaataatgactctgaattacttggcggtgattcttttcatcttctgtgacgtatacataatcgacaagatttcctgggataacaacttcattcggctttagttgatagtcatcaactaaatctttaacttgtacaataactttcccatgattggctttcgtgtttaatgcgacatgataacactcgctcaagtacgcttcttgagttaaataaatgttactttgttgatctgcgtatgttcctctcagtagtgcgacatcaacgctagggaatgtgtagtgtaagtatgtttcatcgtcgatagttactaatgaaactaaatcatcagttgttcgtgtatttactttaccgccaccgtatctaggatcaacagctgtgtttaatccgattttagtaataactccaggtaataattgattactctgacgataatgagttgtaatgataccttgtggtaaaaaataagcttcaatgtcattatttttcattgcttgtgccgttttggaagaagccgttaaaatgctcataatgacacgtttaatcatacgacgttctataaaatcatctaaatccggtgcggcacctaaactatggatatcattcgctaatataaacgttaaatcattgggagtatgatatgtgtcatgttgcgctaacacagcacgtagaacttcggcgggtaagttggctacagctaatgctggtaaaccaatcacatcaccatctttaatgatatgttgtaagtcgtgccatgtgatttgtttcaagcaagtcacctccatcacatttgataaattatagcgtttttacactttgtgtaaacccttacaagaaatataacataacgacgtttaaaatcaattagaaatatctttttattctgataatagacacagtatagacacattttaatgatcgataacaattgtaatatcaagggtttgtaatgaattgaatatcattaaaatgatgatataaaaatattgctcggaatataaaaataacccatgtttatttaaaaaatgcaaagactaattatcattttgatgcatcagtaaggcgaggatgatcatcgcacaatcagtggtgtataatgtaactgatgaaatcattggagagttgaaggagatgttgaacatatgagagtcaatgttttacaacatacaccaaatgaaggtgttggatacataggtgagtgggcgaaggaaagcgggcacgaagtctatatttatcatccatatatgaatgatggtgtgctacctcttgcggaagaaacagatatgttagtgatacttggtgggccaatgaatccagacgatgagatgccttggattcaatcagaacgcgaattaattttagtattgatggcacaaaacaaacccatttatggtgcttgctttggtgcacaacagatttcgaaagcattaggttatgcggtgttaaaatcaccagtaaaggaagtaggttgggatgatgtttacttagaatcagaaatcattccgaatataccaagtcgattgaaggcactacattggcatgaggatatgtttcaaataccgcaacaagcagaattattattttcagggaaccatattaggaaccaaggatttatcatcgatcatcatgtgattggattacaatttcattttgagcctggtccagacgatgtcagagaaatggtactaaatgatgcccaatacatcaatcattctattttagagcaatcggcggaggacatattagcctttgaggtgcctaaacagaataggcaggccattttccgaatacttgattttattactcaagcgtaagatgtgatttgtattttaaaatgagtaaaaaaacgaatgtacacaatcgaacaaagtagttatataaatatatggaaaatccatcaatattcaattaaaatagttttattatgaaaatgagagtaggtaagtctatggaaagtcttaatcatcgaagagacgaagaaaaagaatcggcaacgcaaacgcaatcagttgcacctaatacaagtgaagcggggatgtcatcagcaattacacaatcaactaagacgtccgatatacataatgaatctatcgataagcaaatggacgataaagcttatgaaacagcgcaaaatacagatttgaaacacgaagcaagaagtttatttgataatgcaaccaaatcaatcggtagactagcgggcaatgatgaaagcttaaatcttaatttaaaagatatgttttctgaagtatttaagccacatactaaaaacgaagcagatgaaatatttatagcgggtactgctaaaacgacgccagcaatttgtgacatatcagaagaatgggggaagccatggctcttttctcgagtattcatcgctttcacagtaacatttattggattatgggtcatggcagcatttttcaataatacaaatgcgattccgggtctcatttttataggggctttaacagtaccattatcaggtttattcttcttctatgaatcaaatgcgtttaaaaatattagcatttttgaagttattatcatgttctttattggcggcgtattttcattactaagtacgatggtattatatagatttgtcgtttttagtgatcaattcgaaaggtttggttcgttaacatttttcgatgcatttttagttggattggttgaagaaacaggtaaagcactcattattgtttatttcgtcaataaattgaaaacgaataaaattttgaatggtttattaatcggtgctgctattggtgccgggtttgcagtttttgaatcggcaggttatattttgaatttcgctttaggggaaaatgtcccattattagatattgtcttcacacgtgcatggactgcaattggtggtcatttagtgtggtcagccatagtcggagctgctattgttattgctaaagagcaacatggtttcgagtttaaagatattttagataaacgctttttaatattctttttatcagctgttgggttacatggcatttgggatacatcattaacgattcttggcagtgatacgttaaaaatattcattttaatcgtagtcgtatggatactcgtattcattttaatgggtgcaggtttgaaacaagttaatttactgcagaaagaatttaaagaccaacagaaaaaagtagacgaataataatttaggcttatgttgctatgtgttttagcgacataagcttttttcgtacgtcgtaaaaattttaatacgaagtgtaaaatgaggctgggatataaatcaatgtcctagggtctataatattatattggcagtagttgactgaatgaaaatgcgcttgcaacaagcttttttcaactctagtcaggggccccaacacagagaatttcgaaaagaaattctacaggcaatgcgagttggggtgtgggccccaacaaagagaaattggattcccaatttctacagacaatgcaagttggcggggccccaacatagaagctggcggaaagtcagcttacaataatgtgcaagttggggtgggacaacgataaagaaatactttttctatagtaattagtatttcttatgcatgagttttactcatgtattcctatttttttagtacacattagctgtggctaatgtgtaagaaccactacataataaatcattagtggctctttatcatttctgtcccactccctagttataagcatgatacttacgagttgagtatgtcattctttaaataaggttttaatagtattaaggtttcatcagctttattttgataatctgaatcaccgtttaatgcaaaattcaccataacacctagtacagctgaagttaaaaaacataataatgttgatttacttataccttcattaatgacgcttttagcaattttattttctagttgtttgtaaataacagtctctagttttttactgaatagtgctgaaattgaacttttgaataaaacactgaaaatgtctttattgttatataaatattcaaaccacttaatattaccaagtttaaaatttatctgctctttgaaatgacatatctctacaaaatctgaaatataatcgctcataatacgttcaactaaatcatatttatcattgaaatgtgcgtaaaaggttcttctaacgatatcagatttatcacatatatctgtcactgtgatgtcttcgatgtgttgctcttttaacaacgtaatcattgtttgtttcaatgtccgttgtgtttttttaatacgtttatccatgatatagctcctaaatattgctcgaaaattaagtacctgtgcaataagtcttttttcactaccttttaagtttaaaaatgataggtgaaggtatatattagtgtaacacttgttatttaaaacacaagtgagtaataaaagaggtgatgttagttggaaaagaaaaatattttaatcataggtgcaagtggtcaaatttctcaagagttaattgacttattattagataaaacagaacatcatttaacactttacttaagaaataaagcgaaattgatgaatatagaagatggaaatcgcgtaacactaattgaagcagatgcaacagatgaagctgccttggaaaatgcattggatcaaattgatgttgtattcgctagtttagccggtaatatagatgaacaagctcaggcaattgtatcagcaatggaaaagaaaaatgtacaacgacttatttttgtaactgcattaggtatatatgatgaggtgcctggcgcatttggcaaatggaacaatgacaatattggaccgtatcttccaccatataagaaagcagcagatattattgaagcatctagtttagactatacagtattacgtcccgcatggttgacgaacaacgatgagattgaatatgaaacaacagttaaaggagaaaattttaaaggcacagaagtttcgcgtaaaagtgttgctgcattaggattagaaatcattgagaatccttcaatccacgttaaagaaagtttaggcgtaaataaaccaaatacagatggcgataagccacactggttataaggagttttcaacttgaaaaaagtaaattttaaaagtaataacttaaatgtagtagctaatatgtatttcccagaaaattttgatgaaaataatcaatatcctgcaattgtcgttaatcatccagcaggaggcgtgaaagaacaaacagctggtttatatgcagaacgactagcaactttaggttatgtcacgatggcttatgatgcaagttatcaaggtgaaagtgaaggacaaccacataatttagaaaatccatcatcacgtgtagaagatgtaagagctgctgtggattactttaatacacttgattttatagatgatagtcgtattggtgcacttggtatttgtgcaggtggtggctatacaattaaagcagcgcaaactgaaaaacgtattaaagctgtagtaggcattagtgctgctgacatcggtcaaaacttccgtaaaggttggacgggtaatcaagatgaaaaagacattaatcctttattagaacaagttgcagaacaaagaaaagcagaagcaaatggtgcaccacaaaagctagtaggttttgttccagaagaaccaactgaagatatggatcaagaaacaaaagatggatgggaatattatcgtacgccaagagcgcaacatgaacgttcaattaatcaatttccatttattagtttcgatcgtatcattgaatttactgcatttgatttagtagataaattattgacacaacctgtgctgtttatcgctggtagtgaagctggtacattatggcaaagtgaaaatgcatatgaacgtgcactagaaccgaaagatatccacattgtagaaggtgcgaatcattttgatatgtatgacaaagaaccatttgtaactgaagcggttgaaaaaatgaactcattttatggtcaatatttataaaaattcccgtaagattgaaatgaatttatttaagagaaatgattggttttgtgttataacgaaagcacctatttttataatttgtctttaaaagagtggaagtggaatactttttggagttaaaaaagtgtttcacgttaaacaaatagtgacaattaggtttatataaaatgaacatgattcactgaaagtatgtaataatcattttattgaaattcatcaaacagaaagtaatacaatcatataagcaaattaaaccacgccatcatcatctagaatgacttcggcgtggtttttatagttgaagcggggctgagacataaattaatgtcccacattcccttatcgttcaatcgttgttcgataatcgattaaatagataccttcaggtgttactttataatttttaactttagagttagcagcgactatttgatcgttgtaagcaatataactgtttggtacatctcgacttgataatttaataatatcattagaaatattgtgacgttccttaacatctacagtgtgattcaattgattaattaaagcatcaacgttgctattattgtagtctcctttattaatagcaccatcttttttatatgcttgattaaagaaatagcctgtatctccacgaggaatcgttccgaaactatacatcgttgcatcccatgcagaacggtcttttaagtaaccttcaatgtcatcaacacttttaatgtcgatttcaatatttgcttttttagcatctgattgtaatacttgcgcaattttcgatagctctggacgaccgtcatacgtaattaacttaatttttaaagggtgttcttttgtataaccatctttagctaataacgtttttgcttgttcgatattttgtttggttaacttaggttctttaatatatggaattttatcattaaatggactcgttgcaggtttcgcgtaaccttgataaatatgatctgcaataccttgtctatcaatgatatgatctaatgcttcacgaacggatttagtcatttttttattagtatgattatacataagtaaagaagttctaaatcctgattcttttgacaattttaaattttgattgttttctatgtcttgaactttattaactgggacatcagttattaaatcatctttttgagattctaaatttctgacgcgattattgccgtcttcttggtacgtcacagtaatatgatcaagtttcggtttaccttgccaatagtccttaaaattcgacaatgatatttttcgagattgcttataattttttatttggtaagggcctgtgccaacaggagtttgattaacatctgatttagcatctgtatcataaattgccataaaaggattagctaattcagatacaagttcagggtaagcggagttggttttaattgtcagtttttgacctttagcggtaattgatgatattggtaatgaatatttgaccaagtcgctttttttcatgctattttcaaggctagatttcactttttctgcagtcaatttttgaccgttttgaaatttaacattatcttttaattctatatctaacgttgtatcatttggttgatgatacgatttcactaatactttttctatttttccttgatcatttgttttaaataatgattctgcagcaccaatcttaactggtacatctgtttcataaggtgcaatagactttgtttttaacggtaacgaaatatttaagtctttgccagatgaatgcattgagccacatcctgataacactaatactgctgaaaatatagttgctagtcttttaaacttcatttcattaacactctctttctaattactatgtaaaacccaataattaatattttaaaactttattttgttaaattaaaatgttgttcgagtttagtaattattaaagttcaattaattgtagtaattatgctttttaaaaataaatattagaaatgaagttagcgacatgtatagtgattcacgacaaatatatataactaagtattgagcaactgctgtagtactacagcttgattatgttctgtatcttttgcggcatataacaatagaacatgattatgctgatttacaatatcctttaatttttcaaaagcttctttttgcgtctcattgtctcgcaattctttttcatatttttctttaaaagctccaaaaagtttaggatcatgttggaaccattgtcgcaactcagtagaaggggcaatgtcttttaaccaataatctaggttagcagttcttttcgaaatacctcttggccagactctatcgactaggatacgaatagcgtcggtattatctttattgtcataaatacgtccaatatctacggtcatcttgtgaactcctttcttatgaaattcagtgagcatgcatcaatgcatgttgtggtgggacgacgaaataaattttgcgaaaatatcattactgtcccactcccaattaaaaaacagccatgacaaagtaaagtcatagctgtttttgtatagatgtcatttatttttacgtttagttaaatacttcaaaccaagtgcaaagaccgtgtacccggctatagtttgtatcaatgttttaattaaattattatttttaacaataatatttgcagtaacaatacttacgaaatataatgcaaatacttttacgtaacgttgattaagtttcatatgagcactaaacctcttttctcagttatactgcaacgcttagtcttggaataaatgtttcgtagtgtacgcgatccatatcgtaatttaaagatttaagtgcttcgatcatagattgtaagaattttgtaccaccacagatataaatttcaggtttatttgctaaaaatacttgtaattcttcagcgccaatatagccttgtttatcttttaagtgagtatataacttagcgttgtcatgatggcttgcgatactgttgaagttgtctttgaaaggtaaatgttgttcattttcagcaacttgaaccatctgtgtatctaaacctttggcagaggcagtttcatacattgctactaaaggtgtgacgccaatacctgaacctaagaaaagttgtggttcagtcgtattctctaatacgaatccacctacaggcgcagctagattaatcatatcgccttctttaatctcatcgtgtaaaattgttgaaacttcgccttcatgttctgttgtgacatcacgtttaacgccaaaagttaaatgatttttatcacctgatacgatagaatagtgacgtttagctctatatggaagtttatcactagaaacatcaactgtgatgtattggcctggtgtaaattcactaaagtcatattcttcagtttcaactgtaaatgatttaatgtcttcagattcttgtttaatattggtaattttgaatggtttaaaaccaatccacatcatttgatcataaatttctttttcaatttggatgaacacatccgcaatagcgccatatgctttcgcccaagcttgaatgacagggtcatcttcttctaatcctgtcacgtcttgaatagcttttaataaattttcccccacaattggataatgttcagcataaacttgtagtgcgcagtgtttatatgcaactggcataatgactggtttaataatacttaaattatcgatgttaacagctgcagccattactgcttgtgctaatgctgaagattgcatgcctcgtttttggttcgtttgattaaacatatttaaaagttcaggatgtgccttaaacattttcggataaaaagttgacgtaatttctgttcctttttctttaagcaatggcaccgtttgtttgattatgtctttctcttgttctgtaagcatgatactcctcctttaatctgtctattttgattattctactaaaaatttcgatattcaattaattggtttgagaaaatataaataaaatggcaaatttgataattgtatgacatttttaattttttaaatacttatcaataagtattgtgtacaattgtctgtttgcacaccgacgattgtacgcatttatttggctaattcaaaaaacattgttgttttcttagaaaaaagtaaacatgataataaaaatgtgaaagtgtaaataatcactggcgaagtacgaagactaaagacatctaagatgtaatcgtatacaaattaaaaaggtgtaaaaattaaaataaaatgtgaaataaatcacaatttaatattgacccagtacttaatgcatgttacattttatatgtgaaataaatcacaaacttaaaagcggatgacacatgaccttttaagttatgcgttgaaaataaaagagatgtttatttgcttttgtatcgtcaataagcagcattaaactaacatatttgaaactacacgtatgttagtgaattaatcataagggagtttttgtaatgaacaaatttaaagggaacaaagttgtattaataggtaatggtgcagtaggttcaagctacgcattttcattagtaaaccaaagcattgttgatgaattagtcatcattgatttagacactgataaagttcgaggagatgttatggatttaaaacatgccacaccatattctccaacaacagttcgtgtgaaagctggcgaatacagtgattgtcatgatgcggatctagttgtcatctgtgctggtgctgcacaaaaacctggagaaacacgtttagatttagtatctaaaaacttgaaaatattcaaatcaattgttggtgaagtaatggcatcaaaatttgatggtattttcttggtagctacaaatcctgttgatattttagcgtatgcaacatggaaattctctggtttacctaaagaacgcgttataggttctggtacaattttagattctgcacgctttagattattgttaagcgaagcgttcgatgttgcgccacgtagcgtcgatgctctaattattggtgaacatggtgacactgaattaccagtatggtcacacgctaatattgcgggtcaacctttgaagacattacttgaacaacgtcctgagggcaaagcgcaaattgaacaaatttttgttcaaacacgtgatgcagcatatgacattattcaagctaaaggtgccacttattatggtgttgcaatgggattagctagaattactgaagcgattttcagaaatgaagatgccgtattgactgtatcagcattattagaaggcgaatatgatgaagaagatgtttatattggtgttccagcagtcatcaatagaaacggtattcgcaacgtcgtagaaatcccattaaacgacgaagaacaaagcaagttcgcacattcagctaaaacattaaaagatattatggctgaagcagaagaacttaaataactttttataaaatctataccattccaaaaattgtaaaaccttaccccaaaaaattgtataaagggctatttgatacaactttatgtgtcgagtagccctatttttaatgtagtgaaagtcgttgttgaaattaaattcaaatctggcacttaagctttaatcatagcattaagatgattgtctagcagaggcgatttgcgggcttactacagtgcatgatgaacttaatgcttcaaatgtaacattaaaaataaaagcaacgatgtcacttcttacttcgtacatcgttgccattagttctgttgatatttcggttagtcttaatccccgagcaattcttcaatttcatttttgataactgtaacgtgaggcccataaattacttgcacaccagtgccttgctggattacacctttggcaccagtactttcgagtaatactttatcgactttgtcattttgatgaagtgtgacgcgtagtctcgttgcacaacagtcaacgatttcaatgttatcttcgcctcccaaaccagcaacaatagtttgtgctctttcagtagcctcaacttgttgtgctgcaactttatcttcacgaccaggtgttttgaaattaaatttcgtaattaagaatctgaaaacgatgtaatacaaacagaaccacacaattccaataggtatgacatataggtagtttgttttactattaccttgtagcacaccaaaaagtaagaaatcgataaagcctccactgaaggtttgaccaattgtaatgttgaaaatgtctgccatcataaatgctaatccatcaaagaaggcatggattacataaagaataggtgcgacaaacaagaaactaaactctaaaggttcggtaatacctgttaaaaatgaagtgagtgcagcggataacattaaaccgccgacaacttttttatgttcaggtttagccgtgtgataaattgcaagtgcggcaccacataagccgaacatcatcgtaataaaacggcctgacataaagcgcgacacacctgaataatacttcgtcacatctggatcaccaagttgagcaaagaagatgttctgcgtaccttgaactaagtgccctttgacttctaaagtaccaccaagtgccgtctgccaaaacggtaagtaaaaaatatgatgtaaaccgagtggacctaacaatcttaagatgaagccataaacaaaagtaccgatggcacctgttttcgttacaaatccaccaacatgataaatgccggcttgtatgcttggccaaatgaaaaacatcaatacacctaaaaagattgcggcaaatgctgtaacaatagggacaaatctagagccaccaaagaaacctaaatacggtggtaataccactttgtgatatttgttgtgaagtattgcggtcataatacctgtgataatcccgccaaaaacaccggtttcaaccgtttgtataccgagcactatgccttgtccattttgtgcaagttgatcttttgccaatgtgcctgtgatagttaataagccattcatagttgcgttcataattaagaaaccgagcagtgcagctaaacctgcagtacctttatcgcttctagataatccgattgcgacaccaattgcaaagatgactggtaaattttggaaaacaatactacctgcagctgacattaatgtaaaaatattttgtaataaggtaatatctaaaatagggtatgctttaacggtgtttggattacttaatgcaccaccgatacccaacaatagacctgcagctggtaagattgcgataggtaacataaaggacttgccgaactgctgtgctttttcaaataaagatttcatcaacatccctcctaattattttcaatatagcttttgagaaatttaatatcaatatatattctgtggatgaaaatatttttcataaaaattgtttgaatcatgtaacaatcatataaattgctgtttatattgttgtgaaaatgagttgacaaaagtcggtatagttctgtagacatcctattttttagcgaggtaaggtgacaaagaatatcggataaatttataagccataaaatagataaatagtttttgtatccaaaactatgagaaagttaaaactatttttcaaaataaacatgattaaccacataaataaatatacataagctatcgataacaacttaagaaaggtggaattttgaatgaagagaaagataattatggattgtgatccaggacacgatgatgcaatagcattaattttagcgggggcaattgacagtccactagagatattagctgtaaccacagtcgcaggtaatcaatcagttgacaagaatacgacaaacgccttgaacgtattggatattatgggacgccaagatatagcagtagcgaaaggtgcggataggccgttaattaaaccagctgcctttgcttctgaaatacatggggaatctggattagatggtccgaaactaccggcgacaccatcacgtcaagcagttgcaatgccagcatcagatgtgattattaacaaagtgatgacgagtgatacacctgtaacaattgtagcgacaggtcctcttacgaatgtagcaacggcattgattcgtgagccaagaatcgctgagcatattgaatctattactttgatgggtggtggtacatttggaaattggacgcctacagcagaattcaatatttgggtagatgctgaagcagcgaagcgtgtttttgaaagtgggattactataaatgtgtttggtttggatgtaacacatcaagttttagccgacgatcacgtgattgaacgctttgaaagtatcaataatcctgttgcgcagttcgtcgtagaattattgcaattctttaagaagacatacaagactcactttaatatggacggtggtccaatacatgatgcttgtacaattttgtatttgttacaaccagaattgtttacaatggtacctgttaatatcgaaattgaacatcaaagtccactaacttatggcactatggctgtcgatttaaatcatgttacaggtaagcctgccaatgcttattttgctacaacagttgatgttgaagaagtgtggaacttgatagatcataagttacgtacatacgaataataatacttaattaaatagatacagttaaccctaaggcgcctgatataagcgtccttagggtttttgtagtggattacattggtcatgacaatttgataatgactgagatatgtaaattaaaaatgcactcgaaaaactcgaaatacaaatagatatgtaaaaatttcaattgctttattttaaaagattaaaattgcaaataataccgatataattggaatgctgtcaaaacatcacaatgatgtacatactcattttgaaaatatgtgttcaaagtgtgtacatcggtgtgacgattgatgataaattgagctcagatgctcaaaggaggatcgaacatgaacggggataatcagcaaatactcagagaaattgtattgaatcctactattcatggtaaagaacttgaatcgatatttggtttgtctcgtagacaactaggatatcgcattcaaaaaatcaatttgtggcttgaacaagagggctatccaaaacttgaaagaacaagccaaggaaattttattgtaagttctgaaatcatgacgttattcaaacgagatgtatcggagcagcaaatgttaaacggcaacaatatcatttttagcatagaaacacgtcgttattatttaatgctcatgctttttagtaaggaaaacgcaatgtctctaaaccatttttcaattgatttacaagtcagtaaaaatactgtcattcacgatataaatcatgtaaaagagcaattggaagatcatggtttgtcacttaagtattctcgaaaacatggttatgaaattgttggtgatgaatttgaagttcgccgtttcttcattaagttgattgatcaaaggttgaatcatgatattactaaaagtgaagtcttaaaggcgctcaacttaacattcgaagatatcgcatatcaaaaagacaagatcaaacaggtagaacaatttttgaagagtcgctttatagacaaatcacttagttcattgccttatgtcctttgtgtgattcgtagacgaattcaaagtggtcatgtgattaatccattaaatattaattatcagtatttgagggatacgaaagaatatcaagcaacggagattatgacgcaacatgagccggatttgccagaagcggaaaagttatatttgacattacacttactttcaacaagtgtgcaatggactgatttgcaggaatcagataacatatcgaatttaacgatggccatcgctcaaatgattcaccattttgaacaaatcacttttattaacattgaagataaggagaaattatcacagcaactcttgttacatttaacgcctgctttttataggattaaatataacttaacggatcgtgatgaattaataaatcctttacaaggaaattatcaatcgttatttcatatggtgaaacaatcatgtcaatcgttaactgaatatttcggaaaatcgttacctgataatgaaatagcatatttaaccatgttgttcggaggtagtttgagacgtcaagatgaaaacttcgatggcaagataaaagctattatcgtgtgtacacaaggcacgtcagtatcacaaatgatgttatacgagttgcgaaacttatttccagaaattattttcttagatgcgatttcacttagaacatttgaaaattacacattagattatgacatcgtcttttcgccaatgtttgtcctaacacataaaaaattatttatcacaaaagtagcgttatctgaaaatgagcaacgaaagttacgtaaagaagtgatgaagtacattaataaggaatcggctgacattgataaggaaataaacaagttaatggcattaattgaacgtactacgacagttaatgacattacagaactacgtgatggtttagaagattttattgcgaattataattcgattttaaccattaatggatcgattgtcacacaaaataagacattagatttagctgacttgataccagcaaggcacgtgaaaagaatacatcatgttgaaaatattgatgaagctattgctaaagcaagtgatgtgttagttgctaatcattttattgatattaaatatattcatgagatgcaacaggtatttgatgattcgtatatggttatcatgcaaaatattgctattccacatgcatactctgaaaagcatgtacataaaacagcgatgagtatgttgattttacaagaaccaatatacatgtcagatggcacagcaatccatattattgtacctattgctgctgttgataaagtgacacacttaagagcgttattacaattgagagatgtggcgcaagacaatgacgcaattgagcgcatcatacaaagtcgcagaaattctgatgttaatgagattttaaaaaattattcaaataaagaagcgagggaaaatggatgggacagcaattagtgcatgaagaaaatataatgctcaatttgtcggcaactgataaagaatccgtattgtcacaaatgtcagatgttttatttcaaaacggatttgtaaaagcaacgtttaaagatgcagttatcgacagagaaaaggaatttgcgacaggattaccgacgcatttatgttcggtcgccataccacatacagatgtcgaacatattaaccatagaacaattggtgtggctgttttagaaaaagaagtgccatttgttgaaatgggaacacttgatcaacagacagaagtgaaaattgtcttcatgctagctatggataaagtggatgatcaacttaaactattacagcagttgatgcaaatttttcaaaatgaagaaaaattggagcagattctacgaacgaaagacgaaacaattttagcaacactaatcaatgattatttggaatataactaaaaattaattggaggaattgaaaatgaaacaagtattagtagcgtgtggtgcaggtattgcaacgtcaacagtagtaaataatgcaattgaggaaatggcgaaggaacacaatattaaagtagatattaaacaaatcaaaattacagaagttgggccttatgaagacactgcagatttattagttacaactgcaatgacaaagaaagaatataaattcccagttatcaacgcacgtaatttcttaactggtattggtattgaagaaacaaagcaacaaatcttaacagagttacaaaaataactgaattgatatgtaccgtgggtcaataacatataaatatatgcaaattgcatataaatgactatcacgacaaatgattgttgatgacatagaaacgcagtgactgtaattcaaagggattgcagtcgaatgtagcaagggtagtcgttgaaatgaccgtaacgacaaatgtaatcacaattggaaaatatcgtgacaatgcatatataacagggagggtttaaatatgagttacttcactgattttgtaaggggatttttagatttaggtgcaactgttattttaccggttgtcatattcttgcttggcctattctttaggcagaaaattggcgcggcatttaggtctggtttaacaataggtgtggcttttgtagggattttcttagtcatcgatttattagttaaaaatttagggccagcagcacaagcgatggttaaaaatttaggcgtcagtctgaatgtgattgatgtaggttggccagcaacatcatctatcgcttgggcatcatctgtcgcagcatttattattccactcggaatcatagttaacgttgtattgctagtaactaaagtgacaaagacgatgaatgtagatatttggaatttttggcattatacgtttacagcagcaatggtttatgccgtatcaggcagtatttggcaagcgttattagcagcagttattttccaagttatctgtttgaaagtagcagattggacagcaccgatgatgagtgagttctttgatttaccaggtgtatcgattgctacaggaagtacaatttcttatgcaccaggtatttacttagttaaattgttacaaagagtacccggtctgaataagttagatgctgatcctgaaacaattcaaaaacgttttggcgcatttggagagtctatctttgtcggattaattttaggtttaggtattggtgtgttagcaggttacaaacctggagacatcattaatttaggaatgtcaatggctgcagtaatggtattaatgcctagaatggtaaaaatcttaatggaaggtttaatgccagtttcagagtctgcaagaacatggctaaataaacgttttggcgaacgtgaaatttatataggattggatgcggctgtagcattaggtcatccagcggttatttcgacagcattaattttagtacctatcactgttttgttagccgttattttaccaggaaaccaagtactaccttttggtgacttagcaacgataccatttgttgtcgcgtttattgttggtgcagcaagaggaaacattattcattctgtcattgtgggtacgattatgattgcaatttcactatatattgcaacagacgtagcacctattttcacagatatggcgaaaggtacgaatgtacaaatgccaaaaggttcatctgaaatttcaagtattgatcaaggtggtaatatcgttaactatcttatctttaaactatttagtctattcaattaaaaatcgaggtgtttgtggtgaaagctttagtaaaaacaagagaaggatatggcaacttagaacttcttgataaagaagttgcaacaccgctagatgataaagtaaagattgaagtacattatgcaggaatttgtggcacagatattcatacttatgaaggtcattataaagttaattttccagtgacattaggtcatgaattttctggtgaaatcgttgaagttggagcagacgttaaagattttaaagttggtgaccgtgtcacttctgaaacgacattctatgtttgtaatgagtgtgaatactgtaaatccaaagactataatttatgcaaccatcgaaaaggtattggaacacaagtagatggcgcatttacaaattatgtcattgcacgtgaagaaagtttgcatcatattccagacgaagtatcgtaccagtctgcagctatgacagaaccattagcatgtgcacatcatggcgtttctaagattcaagtgaactctggtgatatagcagttgtaatggggcctgggccaatcggattacttgtagcacaagtgttaaaaagtaaaggcgcaactgttgtggtaactggattggacaatgataaagtcagattaggtaaagcagaagcattgcacatggattatgtagtcaatttacaacaaacagacttaaaaacgtatatcaatggaattacagacggttacggggcagatgttgttgttgaatgttcaggtgcagttccagcagcacgacaaggtttggatattttacgcaaaaaaggtttctacagtcaaataggtatttttaaggatgctgaaattccatttgatatggaaaaagtgattcaaaaagaaataacagttgttggtagtagaagtcaaaagccagcagattgggaaccttcattacaactgatggcagatggattagtggatgctgaagctttggtgacaaaaatatatgatatttcgaaatgggacgaggcgtatcaacatttaaaatctggcgaaggtattaaagcattacttaagccgctcgatttagatgaaaatgaaggagagaattaatatggtagaatcaatgctaacttttatgcttgggccattgagacaaatcactgatttttatatggaacatctgcttgtaagtaattctatcgtcattgcaggttattttgcgacaggtatttttaaaaagaaaaaagttgtgaattaaatcaaagttgaggtgatttacaagtgaaagcattgaaattatatggcgtggaagatttacggtatgaggataatgaaaagccaatcattgaaagtgcgaatgacgttattgttaaagtgcgagcgactggcatatgtggttcagatacgtcacgatacaaaaaaatggggccatacattaaaggtatgccatttggtcatgaattttcaggtgttgtagatgccattggaagtgatgttacgcatgttaaggtcggcgacaaagtcacaggttgtccagcaataccttgttatcaatgtgagtattgtttaaaaggtgaatatgcacgatgtgaaaagttattcgtcattggctcatatgaacctggatcgttcgcggaatatgtcaaattgccagcgcaaaatgttttaaaggttccagacaatgttgattacattgaagcagcaatggttgagccatcagccgttgttgcgcatgggttttataaatcgaatatacaacctggtatgactgttgcagtaatggggtgtggcagtataggtttgttagctattcaatgggcacgaatatttggtgctgcacatatcatcgctatagatatagatgcacataaactagaaattgcaaaatcattgggcgcacatcaaacaatcaattcaaaagaagaaaatcttgagaaattcatcgaaaatcattacgccaatcaaatcgatttagctatagaatcatcaggggctaaagttacgattggtcaaatattgacgctacctaaaaaaggaggcgaggtggtattactcggaataccatatgatgatattgagattgatcgcgttcattttgaaaaaattctgcgtaacgagttgacagtatgtggctcttggaactgtttgtccagtaatttcccggggaaagagtggatggcaaccttacattatatgaagacgaaagatattaatgtaaagcctattatttctcattttttaccgttagaaaaaggcccggagacatttgataaattagttaacaagaaagaacgatttgataaagttatgtttacgatttattagtatgcacctttgaggacgaaaacgctggtatagttatagctatgaaagtgcgaatgccgtctggtctacagatactatcgaaataattcatcttcgaatatacgttgctaaatagccggtttacttgtgtgaaatatgcttgtgaatcggttgttttgcattttgtatacttaaaatgagatggcaatatttgatgatttttagagtgaaaatcaagtacagccacttaataagataaatttattataatatatggtaaaatgatggcagtaataatgaatttgaaaaagagtaaacattaatacctttaacaatttaatatcgtcagtgttaatgattaactgcatgacacaacaacttagaatggtcagttacaaaaatacatttttataaaaaattatcacactattgcgacaactgcctttggcttaataaaagaggcaaatgagcaataggttaggcttatgtgcgggcataggtcagtaatgtattaatgaaaatgatgtaatgacagaatggaggacaacatgatttatgcaggtgttttagcaggaggtattggttcgagaatgggaaacgtgccattaccaaaacaatttttagatattgataataaaccgattttaattcatacaattgagaagttcattttagtgagtgaatttaatgagattattatcgcaacgccagcacagtggatttcccatacacaggatattttaaaaaaatataacattacagatcaacgtgtcaaagtagttgcaggtggtacggatcgaaacgaaacaattatgaatattatcgactatattcgcaatgtaaatggaattaataatgatgatgtgattgtaactcatgatgccgtaagaccatttttaactcaacgtattattaaagagaatattgaagtagcagaaaaatatggtgcagtagatacagtcattgaagcaatcgatacgattgtaatgtctaaagataaacagaacatacacagtatccctgtaaggaatgaaatgtatcaaggccaaacaccacaatcatttaatattaaattattacaagatagttatcgcgccttaagtagtgaacaaaaagaaatcttatcagatgcatgtaaaatcattgtcgaatctggacatgcagttaaattggtacgtggagaactatacaacattaaagtgacaacaccgtatgatttaaaagtagcaaatgccattattcaaggtgatattgccgatgattaatcaagtatatcaactcgttgcaccgagacagttcgacgtcacatataataatgttgatatttatggtaatcatgtcatcgtaagacctttatacttgtctatttgtgcagctgatcaaaggtattacacaggtcgaagagatgaaaatgtactgcgcaaaaaattaccaatgtcactagttcatgaagctgttggtgaagttgtatttgatagtaaaggggtatttgaaaaaggtacgaaagtagtaatggtgccgaatacacctacagagcaacatcatattattgcggagaattacttagcctctagttattttagatctagtggttatgatggttttatgcaagactacgttgtgatggcacatgatcgtatcgttccgctgcctaatgacattgacttgagtacgatttcatacacagagttagtgtcagtaagttatcatgctatacaacgatttgaacgtaaatctatacctttgaaaaccagctttggtatttggggtgatggcaacttaggttatattactgctattttgctacgtaagttgtacccagaagctaaaatttatgtatttggtaagacagactataaattaagtcatttttcatttgtagatgacatctatacattaaatcaaataccagatgatcttaaaattgatcatgcatttgaatgtgttggatgtaaaggaagtcaagttgcacttcaacaaatagttgaacatatttcaccagaaggcagtattgctttgttaggcgtaagtgaattacccgtggaagtgaatacacgattagtacttgaaaaaggattaacgttgattggtagtagtcgaagcggctctaaagattttgagcaagttgttgatttatatcgtaagtacccagacattgttgaaaagttagccttattaaaaggacatgaaattaatgtatgtacgatgcaagatatcgtccaagcgtttgaaatggatttatcgacatcttggggaaaaacagtattgaaatggacgatttaataaaccgatgggggaataacaatgacaaaaacgaaacaagcaatacatattgataacatatactgggaacgtgttcagttatatattgaaggacatagtgaaggtgtcgatttaacatcaggacaatttgttctgaggaatttaaccgaaacaaaaacattagaagcaaatgaaatgaaaatagacggtaatacatttaaatgtagattcaacgtcgcaatattagacgatggatattatttaccaatggataaatatttatttgtttatcatgaccagttagagtatattgaacaacttaatccaaatattattgatcaagcttatgcagcattaaatgaagagcaaattgaagaatacaatgagctgactacacaaaatggaaaagcaaactatgtgttagccaacgaagctaaagttttccgcaaaggtggggtatcacaacatacggtttataccattactccagaaatagcaagtgacgttaacgaatttgtatttgatattgaaatcaccttacctcaagagaaattaggggtcattgcgacaagcgcacactggcttcataaacaaggccataaagcttcatttgaaagtagaagtttcttatttaaagctatttttaatattacaaagttactacatattaaaagaagcaaaacaatattattcacatcagattcgcgtccgaatttatcagggaatttcaagtatgtatatgatgagttactacgccaaaaagtagattttgattatgatattaaaacgatatttaaggcgaatattacggatagacgtaaatggagagacaagtttagattgccatatttacttggtaaggctgattatatttttgtcgatgatttccatccattaatttatacggttcgctttagaccatcacaagaaattattcaagtgtggcatgccgttggtgcttttaaaacagttggctttagtcgtacaggtaaaaaagggggtccgtttatcgattcattaaaccatcgtagttacacgaaagcatatgtatcatcagaaaccgatattccattttatgctgaagcatttggaattagagaagaaaatgttgtaccaacaggtgtaccacgtactgatgtactatttgatgaagcttatgcgacacagatcaaacaagagatggaagatgaattgccaattataaaaggtaagaaagttattctattcgcaccgacatttagaggtaatggtcacggtacggcacattatccattttttaaaattgattttgaacgtttagcaagatattgcgaaaaaaataatgcagttgtgttattcaaaatgcatccgttcgtaaaaaatagacttaatatttcacgtaaacatagacaatactttatcgatgtgtcagattatcgtgaagttaacgatattctctttgttacagacttgttgattagtgattattcatctttaatatatgaatatgcagtatttaaaaagccaatgattttctatgcatttgacttagaagattatattacgacgcgtgatttctatgaaccatatgaatcatttgttccaggtaaaattgtacaatcctttgatgcattaatggatgctttggacaatgaagattatgaggttgaaaaagttgtgccattcttagataaacattttaaatatcaagatggtcgctcaagtgaacgtttagtcaaagatttgtttagacgctaatgttggcatatattacttgccatgcaaatgagtcataaggcatagttttcaaaaagggttctgacaatgaagtgagcaacatgtcatgatgagaagcaggactatacaatgagaatgaccttttgatttttcatgcataagacgatgcaatcaaaagcaatcaccttccaactgaattgtcattttgtaaaataaaataatcaatccaatcgttatctagttcataaatgtgtaaacacatacgttatgaatggataacgattttttgttatgttaaagtggtacattaatcatgtatttcgtatgataattaacgacaagtgtaatggttaaatgtattttatgatgaaatgctataataggcatggttacaatgagcttgctcatacatattaatataattacaaaaacacgtcggaggtacgacatgattaaaactacaattaaaaaattgatagaacacagtatatatacgacttttaaattactatcaaaattgccaaacaagaatctaatttattttgaaagctttcatggtaaacaatacagcgacaatcccaaagcattatatgaatacttaactgaacatagcgatgcccaattaatatggggtgtgaaaaaaggatatgaacacatattccaacagcacaatgtaccatatgttacaaagttttcaatgaaatggtttttagcgatgccaagagcgaaagcgtggatgattaacacacgtacaccagattggttatataaatcaccgcgaacgacgtacttacaaacatggcatggcacgccattgaaaaagattggtttggatattagtaacgttaaaatgctaggaacaaatactcaaaattaccaagatgactttaaaaaagaaagccaacgttgggattatctagtgtcacctaatccatattcgacatcgatatttcaacatgcatttcatgttagtcgagataagattttggaaacaggttatccaagaaatgataaattatcacataaacgcaatgatactgaatatattaatggtattaagacaagattaaatattccattagataaaaaagtgattatgtatgcaccaacttggcgtgacgatgaagcgattcgagaaggttcatatcaatttaatgttaactttgatatagaagctttgcgtcaagcgctggatgatgattatgttattttattacgcatgcattatttagttgtgacacgtattgatgaacatgatgattttgtgaaagacgtttcagattatgaagacatttcggatttatacttaatcagcgatgcgttagttaccgactactcatctgtcatgttcgacttcggtgtattaaagcgtccgcaaattttctatgcgtatgacttagataaatatggcgatgagcttagaggtttttacatggattataaaaaagagttgccaggtccaattgttgaaaatcaaacagcactcattgatgtattaaaacaaatcgatgagactgcaaatgaatatattgaagcacgaacggtattttatcaaaaattctgttcattggaagatggacacgcgtcacaacgaatttgccaaacgatttttaagtgataacttaaaaacaataaaaaattataaattaattagttaagtgatataaataataaacgaaatgtttgcttgtatgttattatttgtgtatgaaaacgtctgatataatgtaatataggtttaaacaaaatatgctaaaatataagcaaaatatgtataattttaagtaatacacagacatttagagttttgattttaaaatgagttttcaattggaaaatgcaacgaaatttaaataattaaatatagatatagttgaatggaggaagtattttatgaaatacgctggtattctagctggaggtataggctcaagaatgggtaacgtacctttacctaaacaatttttagatttagacaacaaaccgattttaatccatacattagaaaaatttattttaattaatgattttgaaaaaattattatcgcgacgccacaacaatggatgacgcatacaaaagatacacttagaaaattcaaaatttctgatgagagaattgaagtgattcaaggtggtagtgatcgtaacgatacaattatgaatatcgttaaacatattgaatcaacaaatggtattaacgatgacgatgttattgtaacgcacgatgcagtaagaccatttttaacgcatcgtatcattaaagaaaatattcaagctgcattagagtatggcgcggtagatacagttattgatgctatcgatacaattgttacatctaaagatgatcaaacaattgatgccattccagtgcgtaatgaaatgtatcaaggtcaaacaccacaatcattcaatattaatttattaaaagaaagctatgcgcagttaagtgatgagcaaaagagtattttatctgatgcttgtaagattattgtagaaacaaacaaaccggttcgacttgtaaaaggtgagttatataacattaaagtaacaacaccttacgatttaaaagtagcgaatgctattattcgaggtggtattgccgatgattaatcaagtatatcaattagttgcacctagacaatttgaagttacgtataacaacgtagatatttacagtgactatgtcattgtacgtcctttatatatgtcaatttgtgctgccgatcaaagatattatactggtagccgtgatgagaatgtcttatctcagaaattgccaatgtctttaattcatgaaggtgtgggtgaggtcgtatttgacagtaaaggtgtgtttaataaaggtacaaaagtggttatggtaccgaatacgccgacagaaaaagacgatgtaattgctgaaaattatttaaaatcgagctatttcagatcaagtggacatgatgggtttatgcaagattttgtgttgctaaatcatgatagagctgtaccactacctgatgatattgatttaagtattatttcatatacagagcttgtaacagtaagtttgcatgctattcgtcgttttgaaaagaaatctatttcaaataaaaatacatttggtatttggggtgatggtaacttaggttacattacagccattttattacgtaaattatatccagagtctaaaatatatgtctttggtaaaacagattataaattgagtcacttctcatttgttgatgatgtcttctttattaataaaatacctgaaggcttaacatttgatcatgcatttgagtgcgttggtgggcgtggtagccaatcagcaataaatcaaatgattgattatatttcaccagaaggaagcattgcactgttaggtgtaagtgagttcccagtagaagttaatacacgtctagtattggaaaaaggactaacgttgattggtagtagtcgaagtggttcaaaagatttccaagatgttgtagacttgtacattcaatacccagatattgtagataaattagcgttgttaaaaggtcaagaatttgaaattgcaacaattaatgatcttacagatgcttttgaagcagacctgtctacatcttggggtaaaacagtattaaaatggattatgtaaatagaaaaggatgaattaacgttggttaaaagtaagatatatatagataaaatctattgggaacgtgttcagttattcgttgaaggacatagtgaaaacctagatttagaagatagtaattttgtattaagaaatttaactgagacacgtacaatgaaggcgaatgatgtcaaaatagatgggaatcaattcgtttgtcgtttcaatgtagctatcttagataatggttattacttacctgaagataagtacttattagtgaatgagcaagaacttgattatattgcacagttaaacccagatgtgattaatgatgcatatcaaaatctaaagccagaacaagaagaagaatacaacgaattagaaacacaaaatggtaaaatcaatttcttattgcagacttacctaaaagaatttagaaaaggcggcatttcaaagaaaacggtttatactgttacacctgaaatttctagcgatgttaatgaatttgtccttgatgttgttgtaacgactccggaagttaaaagtatttatatcgttcgtaaatataaagaattacgaaagtatttccgcaaacaatcatttaatacaagacaatttatttttaaagcgatatttaatacgacgaaatttttccacttgaaaaaagggaatacggtgttgttcacatcagactctagaccaacgatgtctggaaactttgaatacatctataacgaaatgttacgtcaaaatttagataaaaagtatgatattcacactgtttttaaagcgaatattacagatagacgtggcatcatcgacaagtttagattgccatatttacttgggaaggcagactacatctttgttgatgactttcacccattgatttatacagtgcgttttagacgttctcaagaagttattcaagtgtggcatgccgttggtgcctttaaaacagttggctttagtcgtactggtaaaaagggtggaccatttattgattcattaaatcatcgtagctatacaaaagcttatgtatcatctgaaaccgatattccattctacgctgaagcatttggtattaaagagaaaaatgtagtgcctacaggtgtgccacgtactgatgtactatttgatgaagcttatgcgacacagatcaaacaagagatggaagatgaattaccgattattaaaggtaagaaagtcattcttttcgcaccaacatttagaggtagtggtcatggtacagcacattacccatttttcaaaattgattttgaacgtttagcaagatattgcgaaaaaaataacgcggttgtattatttaaaatgcatccatttgtgaaaaatagacttaatattgcagacaaacataaacaatattttgttgacgtttctgactttagagaagttaatgatatactgttcataacagatttattgattagtgattattcatcattaatatatgaatacgcagtatttaaaaagccaatgattttctatgcattcgacttagaagattatattacgacacgtgatttttatgagccatatgaatcatttgttccaggtaagattgtgcaatcatttgatgcattaatggatgccttggacaatgaagattatgaaggagaaaaagttattccattcttagataaacattttaaatatcaagatggccgatcaagtgagcgtttagtcagaaatttatttggtagctaagtttatatagtagtcaaagtgggagaggtataatgatgaaattttcagtaatagttccaacatacaattcagaaaagtatataacagaattacttaatagccttgcgaaacaagattttccgaaaactgaatttgaagtaattgttgttgatgactgttcaacagatcaaacattacaaatcgttgaaaagtatcgtaataagttgaacttaaaagtggatcaacttgaaacaaattcaggaggcccaggtaaaccgagaaacattgcattaagacaagcagaaggtgaatttgtattattcgtggattctgatgactatattaacaaagaaacattaaaggatgcagcagcatttattgatgaacatcattcagatgttttgttgattaaaatgaaaggtgtcaatggtcgtggggtaccacaatctatgtttaaagaaacagcgcctgaagtgactttgttaaattcaagaattatttatactctaagcccgactaaaatctatagaacagcattactaaaagataatgacatttatttcccagaagaattaaagagcgcagaagatcaattatttacgatgaaagcatatttgaatgcaaatcgaatcagtgtgttaagtgataaagcgtattattatgctacaaagcgtgaaggggaacatatgagtagtgcgtatgtttcacctgaagacttttacgaagtcatgagattgattgctgtagaaatattaaatgcagatttagaagaagcccataaagatcaaatcttagcagaatttttaaatcgtcattttagtttttctcgtacgaatggcttttcactaaaagttaaactagaagatcaaccgcaatggctgaatgctttaggcgattttatacaagcagttcctgaacgcgtagatgcattggtaatgagtaaattacgaccattgttacattatgcgagagcgaaagatatagataactatagaactgtggaagaaagctatcgccaaggtcagtactaccactttgatattgttgatggaaaattgaacattcagttcaatgaaggcgaaccatactttgaaggtattgatattgctaaaccgaaagtgaaaatgacagcatttaaatttgataatcataaaattgttacagagctaacgttaaatgaatttatgattggcgaaggacattatgatgtcagacttaaattacattcacgaaacaagaagcatacaatgtatgtacctttaagtgtaaatgcgaataaacaatatcgttttaacattatgttagaagatattaaatcgtatttacctaaagaaaaaatttgggatgttttcttagaagtccaaataggtacggaagtatttgaagtgcgtgttggtaatcaacgtaataaatatgcatatactgcagaaacaagtgcattaattcatttgaataatgatttttatagattaacaccgtatttcacaaaagactttaataacatttcgttatactttacagctattacattaacggattcaatctcaatgaagttaaaaggtaagaacaaaatcattttaactggtctggatcgtggttatgtatttgaagaaggtatggctagtgtcgtgctaaaagacgacatgattatgggaatgttaagccaaacgtcagaaaacgaagtggaaatcatacttagtaaagatattaagaagcgagatttcaaaaatattgttaagttaaacactgcacatatgacttactcgctaaaataaataataaatgccctcaaatctatgtgaactaacatgatttgagggttttattttgctatttatgaaatgattatgacatttccctgattttcattttcatatacattaaattgtatacactgaaaatgaggaggtcgtctataatgataaataaaaatgacatagtagcagatatagtaacagattatccgaaagcagcagatatttttagaagcgtaggtatagacttttgttgcggtggacaagtaagtatagaagcagcatccttagaaaagaaaaatgtagatttgaacgaattattacagcgtctcaacgacgttgaacaaacgaatacaccaggttcgcttaaccctaaatttttaaatgtttcgtcacttattcaatatattcaagcagcatatcatgaacctcttagagaagaatttaaaaatttaacaccttatgtgacgaaattatcaaaagtacatggacctaatcatccatatttagtcgagttaaaagaaacatatgatacatttaaaaatggcatgttagagcatatgcaaaaagaagatgatgttgattttccaaaactaattaaatatgaacaaggtgaagtagtagacgatattaatacagtgattgatgatttagtatctgatcacattgcaacgggacaattgttagtgaaaatgagcgatttaacatcaagctatgaaccaccgatagaggcatgtggtacttggcgactcgtttatcagagattaaaagcacttgaagtgttaacacatgagcatgttcatttagagaatcatgttttatttaaaaaagtatcataaataacgcgattagaaactgttggcaaagtaatgtcagcagtttttcgctatacttaacagaaatttagtgacctgatagtcattattttgaaaaggaaaattgtcaacttagcataaaaattgatataaaattttaatggtataggtaattaaatagtagtgtgtttttttaataatttattcatgaattttacatgcactattatgataaaataaacataattataattcactgaggtgctatcgtgctatcgctaacaatgttattacttgagcgtgtaggtttaattattattttggcctatgtgttgatgaatattccatattttaaaaacttaatgaatcgtcgacgtacatggaaagcacgttggcaattatgtattattttcagtttgtttgccttaatgtctaatttaactggtatcgtcatcgatcatcaacatagtttgtcaggaagtgtgtacttccgtttagatgatgatgtatctttagctaacacacgtgtattaacgataggtgtcgcaggattagttggtggccattttgtaggtctatttgttggcgttatttcaggtgttttcagagtgtatatgggtggggcggatgcacaagtttatcttatctcatctatatttatcggtataattgctggttattttggtttacaagctcaaagacgcaagcgttacccgagtattgcgaaaagtgccatgattggaattgttatggaaatgattcaaatgttgagcattttaacattttcccacgacaaagcatatgcggttgacctcatatcattaattgcactaccaatgattattgttaatagcgttggtacggcgatttttatgtctattatcatttcaacattaaagcaagaggagcaaatgaaggctgttcaaacacatgatgtactgcaattgatgaaccagacattgccgtattttaaagaaggattgaatagagaatcggcacagcaaattgcgatgattattaaaaatttaatgaaagtatctgccgtagcaattacaagcaaaaatgaaatcttatcgcatgtaggtgcaggtagtgatcatcacataccaacaaatgaaatattaacaagtctgtctaaagatgtattgaaatcaggaaagttgaaagaagttcatactaaagaagaaattggttgtagtcatccgaattgcccgcttagagcagctatcgtgataccacttgagatgcatggttctatcgtcggtacattgaagatgtattttacaaaccctaatgatttaacttttgtggaacgtcaacttgcagaaggattggcaaatatttttagtagccaaattgaacttggtgaagccgaaacgcaaagtaagttattgaaagatgctgaaattaagtcattacaggcacaagtgagtccacattttttcttcaattcaattaacacgatttcagctttagttagaataaatagcgaaaaggcacgagagttactattagaattgagttattttttcagagcgaatttacaaggctctaagcaacatacgattactttagataaagagttaagtcaagtgcgtgcatacttatcacttgaacaagcacgttatccaggaagatttaatatcaatattaatgttgaagacaaatatcgcgatgtgcttgtaccaccatttttaattcaaattttagttgaaaatgccatcaaacatgcgtttacgaatcgaaagcaaggtaacgatattgacgtgtcagtgattaaagaaactgcaacacatgtacgtattattgtacaagataatggtcagggtatttctaaagataaaatgcatttgttgggagaaacatctgtagaatcagaatctggaactggtagtgctttagaaaatttaaacttacgcctaaaaggattatttggaaaatccgcagcattacaatttgaatcgacatcgagcggtaccactttttggtgtgtacttccttatgaaagacaagaggaggaataaatatgaaagcattaatcatagatgatgagccattagcacgtaatgaattaacatatttattaaatgaaattggtggttttgaagaaattaatgaggcagaaaatgtaaaagaaacattggaagcactactgataaatcaatatgacattatatttttagatgtcaatttaatggatgaaaatggtatcgaattaggagctaaaattcaaaagatgaaagagccacctgcgattatttttgcaactgcacatgaccaatacgcagtacaggcatttgaattaaatgcgacagactatattttgaaaccgtttggtcaaaaacgtattgaacaagcagtcaataaagttcgtgcgactaaagccaaagatgataatagcgcaaatgcaattgcgaatgatatgtcggcgaattttgatcaaagtttacctgttgaaattgacgataaaattcacatgttaaagcaacaaaatattattgggattggcacacataatggtattacaaccatacatacaacgaatcataaatacgaaacaacagagccattgaatcgttatgaaaaacgattgaatcccgcttatttcatacgtattcatcgttcatatattattaatacgaaacacattaaagaagtgcaacaatggtttaactacacttatatggtaatattgacaaatggtgtcaagatgcaagttggacgttcatttatgaaagattttaaagcgtcgataggattactttaacagtaatccttttttttatgcattttacctatgatattttgtatttcggactaaaattcacgcaaatcgaagtgagccatctatactttagttaaatcaaacgtaggaggcaatggtcgtgaaacaacaaaaagacgcatcaaaaccagcacacttttttcaccaagtcattgtaattgctttagtactctttgtatcgaaaataattgaatcatttatgccaattcctatgcctgcatcagtaatcggtttagtattattatttgtattattatgtactggtgctgttaagttaggcgaagtcgaaaaagtaggaacgacactaacaaataacattggcttactcttcgtaccagccggtatctcagttgttaactctttaggtgtcattagccaagcaccatttttaatcattggactaataatcgtctcaacaatactattacttatttgtactggctatgtcacacaaattattatgaaagttacttcgagatctaaaggtgacaaagtcacaaaaaagatcaaaatagaggaggcacaagctcatgattaaccacttagcactaaacacaccttacttcggaatactgttatccgttataccatttttcttagcgaccatattatttgaaaaaacaaatcgtttcttcttattcgcaccgctatttgtcagtatggtatttggtgtagccttcctctatttaacaggcattccgtataagacttacaaaataggtggagacattatttacttcttcttagaaccagcaacaatctgttttgcgattccgttatataaaaagcgtgaagtgcttgttaaacattggcatcgtatcatcggaggtattggtatcggtacagttgtagcgttattaattattttaacttttgcgaagttagcacaatttgccaatgatgttattttatcaatgttacctcaagcagcaactacagcgattgcgttaccagtatcagctggtatcggtggtataaaagaattaacatcattagcagttattttaaatggtgtcattatttatgccctaggtaataaattcttgaagcttttccgaattactaaccctattgcccgaggattagcacttggaacaagtggtcacacattaggtgtagcaccagccaaagaattaggacctgtagaagaatcaatggcaagtatagctttagtgttagttggtgtagttgttgtagcagttgtgcctgtctttgtagcaatattcttctaaaacgaaaaatctaagcaagataatagcagtttgagccattgttattatcgaaaaaaaacgtctatactccggttgataactggaatatagacgttttgatgtatgtactactttttacttgggatataaaactgtgcatgacgataatgaaatacgatgtcagatgaatcaaaaggtttgccagtcattgtataaaacgtttggtgataacgtaaacatggttcgcctgcagataattgtagtaatgccgcttcacttgaagtaagctggtctacattaaagaaaatatctgaaaatccaacacgtagtttcatgtttgactctaaatagtcgaagatggaacctttagcgatctctgcagttaaatattttacaacctctttatgataataagaatattcgatacataaaatatcttcatcaacaaagcgtaatcgttctaaatagtacacagtatcattgggatttaactgaagttcatcttgcacagatttaggtggcgttgcaatttcttcgaaagcaagtaccttactcgtcatacgatgctcgcctaaacttttagaaaaaccattggtcttaaaaacattgatacgatttgcatctgcaatatttctcacatatataccgctaccttgtgcctgatagatcaaaccatcttgttccaataagcctaatgctttaatgatagtactcttacttacttgataacgttcttttaattgcgttacacttggcaacttatcaccaggtttgaaattagaatgatgtataaacgcattaagttgcttagcaatatgttcgtactttaacaatattttatcctcatttcactttatctgtaagtattatagcacaaaatattataattgtatcggcatttacaaaatgaaccggtacaattataattatgataagtcatatatttccattctattatcaagttgagggggtaatacttatgggcaataaatataaagattatgctcaagacatccttacagctgtagggggtgtcgaaaatattgttaatgtttcgtatgatacggtacgcatgaccattcatatgcatcatgcaattccttctactgctaatgaagtaacacaaatagatggcgtggcgtcagttgatgaaaatgaaacacagttagttatcgtatttaatgaagaagtaaaatatgtatatcaacaattacaattgttaatggacgacgccaagcatcaagaagatacgaatcatgatgctgtggatactcaagaaacagaacagaaagcgcaagcaaaagtgacaacaccaattttagtgaaagcaccaatcgctggtcgtcgtatcttgcttaaagaagttagagattcaatttttagagagaaaatggtaggcgaaggtttggcaattaaagctcatgaagaatttaaagtgattgcaccatttagtggtaaagtctcaatgattgtacctactaaacatgctatcggtattcgatcagaagaaggtgtggacatagtcattcatattggcgtgaatacagttgacttggaaggtaaaggattcaagtgctttgtaaagcaaaatgatcgtgttgaagcagggcaaacactgctacaattcgatcaacaatatattcaggagcaaggttataactcagacgttattgtcgttattagcaattctgccgatttaggaaaagtagaactgacaatgaatgaaatcattacgactgaagatgttatttttaaaatatttaaaagctaggagtgtgttgtaataatgacaaaattaccgcaaaattttatgtggggtggcgctcttgccgcaaatcaatttgaaggtggatatgataaaggtggcaaagggttaagtgtaattgatgttatgacgagtggtgcacatggcaaagcacgtcagattacagaatctatagaccccaatcactattatccaaatcatgaaggtattgatttttatcatcgttataaggaagatattgccttgtttaaagaaatgggattgaaatgtttacgcacgtcgattgcgtggacacgtatctttccgaatggggatgaagatgtgccaaatgaagaaggactcgccttttatgatcgtatctttgatgaattaattgcacaaggtattgaacctgttgtgactttatcacattttgagatgccacttcatttagcgaaatattatggtggatttagaaatagagaagttgtcgattattttgtgcattttgcgcgtgttgtatttgaaagatataaagataaagtgacatattggatgacgtttaatgaaattaataatcagatggacacatcaaatcctatctttttatggacgaattctggggtagcattgacagaaaatgataatcctgaagaagtcttgtatcaagtagcacatcatgaacttttagccagtgctttagcagttcgtcttggtaaagagattaatccgaagtttaagattggaacaatgatttcacatgtacccatttatccatattcgtgtcatccgaaagatatgatggaagcacaaattgcgaatcgcttacgtttctttttcccggatgttcaagtaagaggttattatccaagctatgctaaaaaaatgttggcacgaaaaggatatgattttggatggcaagaaggggacgacagtattttacagcagggcacggttgattatattggctttagttattacatgtctacggctgtaaaacatgatgttgatactacagttgaaaacaacatcgtcaacggtggtttgaatcattctgtggagaatccgcatatcgcaacgagtgattggggttgggcgattgatccagatggcttaagatatacattgaatgtgttatatgatcgttatcagttgccactttttattgtggaaaatggttttggtgcagttgatgaagtggtagatggacatattcatgatgattatcgcattgaatatttaaaagcacatattacagcagcgatggaagcagttgatcaagatggtgtagatttaatcggttatacgccatggggaattattgatattgtttcatttacaaccggtgaaatgaagaaacgctatggtttaatatatgttgatcgagataatgatggtcatggcacgatggaacgcttgaaaaaagattcgttctattggtatcaacaagtgatagcatcaaatggagataaattataaaggtatattataaatattttagggttagagcccgagacataaattaatgtctcaggccctacagtgttatattggcgggctcccaacacagaagctggcgaaaatacagcttacaataatgtgcgagttggcaggcccccaacacagagaaattggaacaccaatttctacaggcaatgcaagttggggagagacagaaataaattttgcgaaaatatcatttttgtcttactccctttatcatttctgttccaatcccgtgatgttaaaattttaagaaaaaaataatgccactaaccaagtatgtatagtgttaatgtttgagtgtttataaaagtctttaaccaaaattgatgacctactaatcaacgataacgatattgttaagtagatgattagtgtcacaaagaaattaaagtgacagtcaaacatagatacaaagtacagttagtggcattatatttagtgctcttttttagcgacaaaagtaatataattcatatctttacgcaatttagtcatcgttttaaacattttacaaaacattggtcgattttctttttttaaagcattgttgataatctttatagttccaacaataccttcgtcataaattaaaccttttggtgtcattaaactcattggaccagtatgataatgcacatgattaaaaccagcttgattatataaatctaaccagccaagtttcgtctgcggtgagacattgacattaattgctgcagataatgatttaactacatgtgtggcatgtgattcattaacgatgacaatatcatgtgttaacaagatccccccaggctttaagactcggtagtactcgcgtaatgctttttcctttatggcgatgggtaacatcgttaacattgcttcatttaaaacgatatcgaattgattgtcgtcaaagggcaatttaacagcattcgcttgttgaacttgaatatatgattcaagacctgctgctgaaatattttcctgtgctttttctaatgctttcttatttatatcaacgccttgaatgtgacagccatatgtatgagctagataaatagatgttgtgcacatattacatgccacttctaacacttgtttatcttgtgaaaatgccccttgttgtattaaccaatctgttgcttctttaccaccggggcgtagacgagtttttcctaatttagctaaaaatgtatgaccagcttctttagacatagcataacctccttttaattgataattattatcattaatatagcatatttatatgcgataatttggaagttaaaaagattacaaaaaattgtcacttcatttataactaaacatgagttatcaagcataggtttagtggaaaattatttctaatagatgatgttttataaagataaaaaagcacagccatgatatacgaatgttgcaagttatatgctaaaccttcatatcatagctgtgtttgattcatttaaacctgatttacttcttctagtagaggaatagatgcttgcgcgccgtgtttttgtacagtgagtgagctcgctttattaccaaaatcaatagcatctgctaagttatcttgcgacttgtttaagcgactgacaaatgcaccaataaatgtgtcgcctgcagcagttgtatcaatcgcatttactttataagcttcgatgtgttggctttgatttttagtagcaaaatatgtaccttgcttacctagcgtaatcaaaacagtcttaatgcctaaagataaaaagtaattagcattgtctttcatagattgttcattagttactttaatcccagataacaattcggcttctgtttcgtttggcacaataatatcgattagtgataataattcattaggtaatgctttcgctggtgcaggatttaatactgtcgtcacatcatgtgccttggcaatttcaaatgcagatataatagccgggatgggcacttctaattgtgcaacgacaaagtctgcattgattatagcgtcttttgcgttaataacatcttcaggtgtcatcgtcatattcgcaccaccataaacatagatggtgttttgtccttctgcattcacagtgataaaggcttggcctgtttttgcttcagttgttttgataataaatgatgtatcaatatgagccgctttaaaatcttctaagatgaaatcagcaacgccatcagtgccaattttagtaataaatgttgtgtctgcttgcatgcgtgcagtggcaatagcctggttggcacctttacctccgccgaatgctttttgtgcttcttcaacatgtaatgtttcgcctggttgtgcatatctttcaactgttaaaaattgatcgacattcgttgaacctaaaataacaactttgttggtcatgtgtatgctcctttcaagttataacttttaaaaagtaacattcgattctaatgcaatattagagtagggcgttgtttcaccagtacgaatattacctttatttaatgggtgagctaagttacttttcatttcttcgtgaggaatgaaaatgatttcgatttccgatgaaatcaattgtttaatttgttgcaattgtgtaggattatgttcttttatttcttctgctaagtatattttttggatttccatttcttctaacactgtggctaagacatcaataaagcgtggtaagtttttagtgacagctaggtcgatacggcgatgatcatttggaattggcatgccagcgtcattaattgttaataggtcaaaatgaccaattgtcgcgattgcttttgaaatatgttcatttaaaacagctgattttttcatgacatctacactccttattttataaatactgtaacagaagcggctactaaaatgagtactaagccgataattgtaataaccatttcttttgatgttttatgttgttttaagaaataaataccagttaatgtagcaagcacaacggatgtttgagaaagaataaatccagttgctaaaccattcatattaggttgtgctgaaataagatatgttaaggcaccaaatgcaaagaagaaacctgaaataatttgtaaccatgtaattttattacgaaatggattctctgctttcatattcataaagccataaatgactgcaacaattaccatacccattgcttgaggtaaaaaggcagttagggcatcgatagaagttgcttgcggtgcggctgaatataaccagtatccaaattcaccaattaacagaagaatcactgcacgacgtaaatttttggcgttacttgcttctttgcgttcactccaaactgtcatacgcgcaccaattaaaataacgactaaagctgtaaagccaatgattttgtgaccaatgcccggccaatttcctaatgcaaagacaccccaaaaagatgcgcctaataattggaatgctgttgtgacaggcattgcacgagatgaaccgactaattcgaacgctttaaatgtaatgatttgtccgaatccccatcctgcacctgataataaggcgaatagtaaatttgttccagtagggaagccacttgatgtgactacggctaatataatagcgaagattaacgtacctacagtagcaccgataatttgatgtacgggtttaccaccaaactttgaagcgactgttgggaagaatccccagccaattaaggggcctaacccgataagtaatgcaacaatgctcatgttatacacctcacgatttgtttttagtaaaacgttttaccagtgccatcgtaccatttttatttgtaaaatgcatgcgttttcataaaaactgaaaacgtttaaatcatatttaaaaattcatacattattattttaatttctaagtgaaataattatgattaaaaaccctcagcattaaagcaacgctaagggcataacaatgatgagtaaatttcggaagatacgtagttagtttgaaagatgatagccagttgttgcacgaatttttaaagtcgttgataattcaatcatatcaatggatttatctaagtgctgtaatcgttgaagtaataaggttaaagatgttttgccaatatcagttataggttgtgccacagtagttaaaggtggtgagacgtacgctgcataatcaatgtcgtcataacctattaatgagatatctttcgggatactgatgccatgttcaattaatcctcgtaaaataccaatagcgagttcatcgttaatggcgaagattgcagtggcagattgaaccatgatgtcatcaacaatggttagcccaccgtgcttagataattcagtatggacgatttgtggttcgggcaattgattcgcgcgcaaagtatcaacaaatccagcgacacgagtcgacatattcgccatcatgtcatatggtgcaacaatcatcatattgttgtgaccgagttctactaaatgttgtgctgcaagttgtccgccttgatattcatttgtccgaacaaaatctgtatagccttgatggtcattttgatccagtacgacataaggtacatgatgtttctttagatagttatttagggcatccggggatgaaatgtattgtgcgataattaatccgtcaatacctcgatcaattaaatgtttaatattgtcatacaaatcagttgctgtagatgttaaaaagcataaatcaacatcagatggtttgtggtcatgaatactttgcatcagtgctgagaaaaacggatttgttaagctaggcaaaatgacgccaatagtttgaattttactgccgcgcaattgttttgcatgtttgttaggggcatagcctaaacgttctgaaacggcatgtacgttttttatcgttgttgcggaaaaacgactatcattatgatttaaaatatgtgacacagttgtaactgatacaccagcttctctagcaacatctttaattgacacttttttcatattatattccttctctttattgtgtaattaatcatacagttatatacccgattattatattcatcatatcatgataagcatttgatgacataagcagaggtgcatgacttttattgtctacaaacagacgtctatagtatgcgattaaggttgaggcgagagaatatattattaaggttcaataacttttaatgattatgataacaagaattttaaaatctttattgtgatgaaaaatacaaaagccattattttaaataatggcttttgtatttgaaaaaagtattaaaaaatataacgaaatgatgtggttagctcaagatcaaacaccttcttataaaactattaatcgttttagagtgaatcctaatactgatgcgttaattgaatctttatttattcagttcgcttatttttatagaaattgatgtatatcattttaaagtgatacagatatttcgaaacatgattcttctattatatttaagatttaactgtttttggaatgatcatgtatgcagataatgagccgagtatcattaatacaatgctaacgataaatgttacagttgcagctacacttggtgcatagtttagttgtaatatactgaaaactgtagtacttaatgctataccaaaggcgccacctagtgtaccactcattttatataatcctgtagctaaaccaactttttcattaggcatactgaaaattgcaattgtaagaccgggtgttgcgactaaaccatttccgattgcgcaaatgacaaacccaataacaacagcaatgatatattgtgatggttgaagtgatgtcatgctaataatagtgatgccgatgacagggaacaacggaccaatgatgagcatcaatttgccaccgaaacgtaatgttgctttttcacctaaacgaatcatcgcaactgccacaatggcatatggcaatgtaacaagtccagattgcgcagctgataaaccaaggtgtgtttgagcatatatgaaaaagaccactgttacgcctagaccactatttaaaacaaagttatttaaaaatgcaccaatgaacggacggttgcgtaatactgagaaatcaataaaaggtacttcatgtcgacgttcgatgatgatgaatatcaacgtagtgatgataaaaatgctcagacaaatgaatgaaaatgtactaaaccaaccttgttcgaatccttgtgttaacaataatgtaaagcttccaatcataacagcaaaaatagacatacctttgtaatcgaatggatgacggtggctatgttgacttactttttcaggtgtgccttttagaagcaatatggcaatgaaagcaatgacgatactaatgatgaaattcgtttgccatccgaaatttgtggcaattaaaccgccgataacaccagctaggccgatgccaccaacagtactaatcattagataactaatcgctcgtcttaaatgatctcctttaaattgattatttaaaacgccaactgttgaaggtaacaagatagctgctgatagaccttgtaaaattctaccgatgatgagcagtgcagtgatgtccgatataattaatagaagagatgcaaacatactgattatgagacccatgtatgtcattctcagttgtcctattttatcagcaatatcacctgcagccaccatgaagatacctgtggcgaaggaagttaaactaatagataaatttaacacggcaggagaggtttgatacgtttgaccaacgagaggtcctatattaataaatgattgtgcaaacaaccaatatgttaatgcagacaacataatcgcaataataatattactgcgtggtgaagattgtgtgttattcacagatgtcactccttgtaaaaattaaatatagaaagtcatgagatgaagtgaacggatgtatagatgatcgttcactcacacataagtcatgatttccttacatatcataccacagttattgagaatgaatatcaattaattgcttgtatgattgattttttatagtatgtttaagtgaaacagctttatttgaaagtgattaaagtaaatgaaggtacagaggagtgagaacaatgtgcacaggatttacaatacaaactttaaataatcaagtacttcttgggcgcacaatggattatgattatccattagatggttcgccagcagtgacgcctagaaattatcgttggacatctcgcactggcacgacaggccaaacgcaatatggctttattggtacaggaacagatatggaaggttttatttatggtgatggtgttaatgaacatggcgttgccatttcaacacaatatttccgaggttatagttcatatggctcaacacacaaagcggacgcgatgaatattacgcaaaatgaaattgtgacatggattttgggatatacaacaagcattgaagatatgaaacaacaagcatcccaaatacatgttgtagctgtatatttaaatgatatcggtgaagttccgccattgcattatcatgtttccgatgcaactggacattcagtcgaagtttcatttaaagagggtgaagtggttataaaagataaccctattggtgtcttaacaaatcatccagacttaaattggcattatagtaatttaagacaatatatcaatatttctccttatccagcaacagcaaatttattggaaggtgtaacgattgaacctttaggcaatgaagcaggtacatttggattgccaggtggatttacttcaactgagcgctttgtgagaatggcatttatgaaagcaaacattgctcaaaacaatgataaagaaatggatttaatgaatgcattttatttattagatgcggtaaatataccaattggaattgtacgtccgcatgatgctgacaatcactatacgatgtatcagaccgtaataaatttaactacaagaacgttatatactaagtattatggcagcaatgaaatagtagcattaaagctcacagatgatttaattaatagaaaagatatgacgatttttaagcctgagaagcatatcactattagaaagttgaatgacaatcaatagcgattgagaatggaatatggttgatatgatttgatggatgattactatcatacattagcgttgaaccgtgaacatggatgaatgattagttgttaattttgaaaatttataaaaggttaaacgaacgcagtgagagatgtcattttaatatcaatgtatggctattttgtaatgacaatgtaatgagtttagtaaaacatttcgggaatattaaatagttggaaaatgagaattaaatcctttactcagttgtctaattcttttagtatgtgcagtacagtttaattgaaaactaactttaactttaatggaggatgttttatacatgaaaaaattaacagcagcagcgattgcaacgatgggcttcgctacatttacaatggcgcatcaagcggatgcagcagaaacgacaaacacccaacaagcacatacacaaatgtcaacacaatcacaagacgtatcttatggtacttattatacaattgattctaatgggtattatcatcacacacctgatggtaactggaatcaagcaatgtttgataataaagaatatagctatacattcgtagatgcacaaggacatacgcattatttttataactgttatccaaaaaatgcaaatgccaatggaagcggtcaaacatatgtgaatccagcaacagcaggagataacaatgactacacagcgagtcaaagccaacaacacattaatcaatatggctatcaatcaaatgtaggtccagacgcgagctattattcacatagtaacaacaaccaagcgtataacagccatgatggtaatggaaaggtcaattaccctaatggcacatctaatcaaaatggcggaccagcaagtaaagcgacagctagtggtcatgcgaaagacgcaagctggttaacgagtcgtaaacaactacaaccatatggacaatatcacggtggtggtgcgcattacggtgtcgactatgcaatgcctgaaaattcaccagtttactcattaactgatggtacagtagtacaagcaggttggagtaactatggtggtggtaatcaagtaacgattaaagaagcgaacagtaataactaccaatggtatatgcataataatcgtttaactgtttcagctggtgataaagtcaaagctggtgaccaaattgcatattcaggtagtacgggtaattcaacagaacctcacgtacacttccaacgtatggctggtggcattggtaatcaatatgcagtagacccaacgtcatacttacaaagtagataatacagtaaatcccaagttacgatatcatacgcaacttgggattttttcgttttaataataggtataagcccattgcttgtcctctaaaacatgttgataaaaaggatcttggccaattaacttgatatcatctgcaagtgcttcaacttcatctaaatgatgggtagttaatataattaaacatttagatttcatgatgttaagtagttggtggatgtcatgtctagatttcaaatcaataccaactgtcggttcatctaaaattagaatttgaggttgacctagtaaacctactaatatattaattttacgtttattcccaccagacaatgtagatactttggcagacgtatcatcaaagtttaattgctgtaaatattcgttgatagttgtgttagatataggtgttttgcagagtgatttaaagaacttaatattctcagcaactgtcatatgctcaaataatgcaatatcttgaggtacataaccgatatgattttgaatttgtctttgattccatttttcaccaaaataggtgatgcttccattgttagctttttcaataccagcaatcatacgaagtaatgttgattttcctgcgccattatcaccgagtaaaatcgttaagcggttgctatcaaatgacatggataagtgatggaaaatctgtttattgcggtatcgctttgtaagattattaatttctatcattagatacgctcctttacatgaaaatggtcaaatatacgatactcatagcaaatgcatatataaatgtcataaatagacgatgacttaatgtttgaatatggaataagatgaacacaatgccaatttcataaactaatataagtaacagtgattttaagtaaaatactaagctgagtggttgtgacatgtataaactaactgcccataatacaaccaataacaaggtactatgtgttagtacataggtgctatatagtttcaagcgacttaagtgatattgagataaacgttgcaaagctgcttgttggtttaatcgatagtgaagtacaacttgaacagcacttacacataaaattacagcaaatattaagctgattgaaatggagtgttgtgcttgtttagtaagcgacacaaatttgattttagattcaggtgtatgtttatgataggacttgttgatagcatcgatggattgatgctgtttcatatcctcaaggtgttcataaataatgttaggaatttgctgttcatataatgagctactaacaatttctacagcaataccacctataaagtcatctctaccatataactgtatcgtttcttttaaacggttctcttttaatttttgagagaaacctttaggaatttgcatacttaaaatagcttcctttttagtaacatcatcttcaatatagctttcatcttcatcgacttttttaatagttacatagtcagattgtttaattttattgacgaatgattttgatgcagtggtttggtctaaatcttgaatggtaatcggtattttgaagttgtcatgtgctacacggtaacctataccaataagtacgagtgcgatgacaatggttgttacgagcaagatgtattgtaaccattgcttgaacacaacaagttgtatataaggcttcattgacgatacctccaaaccaatacagctaaattaattatcaaaagtgcgatgaagctaagatagaaactagggtgcagttctaaaatgaagttgtttaaaataatttctaacaattgatttgttacaactgcgaacggttgaatattgaaaacgccatttgctatatgttgtaaaaaaatcgtaggtattgttaaaccagataacaccaggatgacaatagctaatatgactttactaatactattcaacaagcctgttgttaaaagttcgatgagtaataaccacagtattaaaaaggtaacataatagcttaaatgaatggctaacgttggccaattatataattcaaaggtattcggaatactgaacacaatccaaactacaccaacgatactccataacatagtataaaaccatgtaatcaacgcacgaatgattaataaacgctctttagaaaaatgaaacattttcaatcgcgctttcaatacagtatcttgattcattttcaaaactgtaaataaagatagtgcaaagatgaataccgttgctaaaaatcctgtaattgcataataactgcccgtatcgtataaatgaatcggttctaagttaaatgcacctgaacggtttaatcctgtaatcagcaaatcagtcataacattgatactgtcagaatgtgatgttttcggtgctaagtcttgaaaagctaagatgccacccattgatcgcataagacgttggtaaacagaatctgttagctgagatagcacgacacttttcatggattgttgatcatatgtatatactgaaattggtagttcaccttgtttataaaatgccttggtcatacctttatcaaaaacaaaatagccttgaagtttatgtttttttaacaaagtatgtgcttgcttatcatcatatgctttaatgctcacatttttacctaggttactccctttaccaatagagtttaagattaatttcgtttcacttgattgatctttatctacgacacctatattaaaatgattgtcatcttctgttacatgttggattgtcgttaatgtaataaggagtgccgctaatataaatagtaaatagataatcaaataccactttttcaataaaaaagagtggtagatgcgaaacaaatgtattgttttcatttaaccactcctccaatgataagattgaaaggcaagatgaccttccaatcttatttttatattttagttatttagatgccttttttaaaattgattcaaacattttgccgccatttttttcgatttctttttcaagtttttcacggtcttttgaagatagactattgaaatctttcgcaccactatcatcaaaatcaatatctgctttcaattttgtgctagattttaaaatgaaattaattggttcttcagcatatttgatgccgatatttaacgtagatttctgagtgttattttttacgtcagaatctatattattttcaaaagtgaattcattttcgtcgctatatttatctaatgcgacagtgattttacctttatcttgacgttttgtgccatctactttttcttggttatctaatttgatttttgattcatcatattctgtctttttaccaaattcgtatttatcactgtatttattgtctttttccttagaagatacgcctttaattgtatatttcgcttcagcatacgtgtatttatcttgatcgaaatcaagtgcgtaatctagttttaacttatcgtcttctaaagtattagtacctttgattttagttttgttattttctttgtctgtaatagtaatttctcgttttacaatcgtatgtttttcggtataaattttagattgaattttagcaaattcatcctttttagtttctttgacatcgtcaattgcttttttgatgtccttatcaaagtcttttgtagcaccttgttcttccattaattttttaaggtctttatcctttttagcttcttctaatacagctaatgtaatttttttagtgtcagctctgctaagtgttaacgtgacaggtctaactttgtacttttcaccattaaccttaatttcttcttttttacctttatcaaaattatcgtcatctaatttgtcgacaataagttcggaatatttttcggcaattttgctgtagtcactttgttgtgcttgagcattactaaaaagagtgtttaaatttagttgttggtttgtaataccattttcttttgctatttcttcatcttcacctgtaagttttgaatacgttgataataaatcagaattattaacactatatttccctttaaataatggtgattcgaaataatgcttatctttatctgcagctaactggaatttccctaatgcagagtctgctattgttggttcaagattaatcattgatttctcttttttaggatcatgtccatatgacattttaattttcgaagcattaacaacagatttaggaataccaagccccttaacaatttcgtctgatgcatctgcgcttaattctaatgaagataaaaatgaattatctttcatcttttcttggaacttcacttcgttttcaaaacggtcattaaaataatctttatacatttttgcagtttgttgttcactttttaagtatgtatttttcggtgtgtttgcaaaaaatgcataaactccccatgcgattccacctattaataataagacaataataataggaattataatttttaactttttagacattttgcttcctcccaattatttatgagttaatcatatcagaacaatacattttattaaatggtttattttaaattttgtttaaattaatagaattttagttataataatgtttaataagttattggaaatctaataaactacaaaaaatagtttgattacataatgattcttgaaaaatgttggttaacttaataatatgcatttttttggcgaagaagatttatttaacttataaaaatattgaagtaagattggggagattatgaatttatggaattgaaagtcgatgattttgtaaagaatataaaaagaccgtacttaactgtattgggagtatttgtagttgcctattcattattttttgattcattgatgtttttctatggcaaactatatgataaattgcctgtatatttgctggtgtttatggcctttacagctgtaattttgattatgatgtacatacaagagaaaaatgagaattacaaagttgaaaaaagatatgtggttagatatctcacacttaacgttattgtgggatatactttgccattgcttttggcatctatttatgtttttggggtagctggttttggatttgacgtttttaattattggctaggtatagtgatgatgctatttatttcttggttaggcttatttttattttataaaaatgaatttgatagtgaaaatccgaataaagcagttaatgtcatagcaattattataaaattatttgcatttggtgggttattctatattagtacaattgtacctaacactgcagatgaagaaaaatttatatatacaagtattctaataaatttagcttctgatgctcttcttgttaggtcatattttaattacgcgttatacaagagtattaagaaagatatcgaaaatgaaggtaagacaatgtaaaggaaagacataaaaattaataggagtctaaccatgataatttttattttaataacaatatttgctatttattatatagctatgattgctagtttgtttaaaagtgaaggtttttcaataataggtttaatattagatgttgttataatggggacattgattttttactattttataggcgctcgctttgttgataatgatttaagcaactttttaatgtttatggatactggatcatatatttttatgtactttgcaattaagtgtttatgggtgaaacctaaggtagtaaattatttgattgcaaaagaattgggtgaatctaaagaggtcattgaagagcaggaattagatttacaaacatcaaagataagaggtatctactttttcattatttcagtagtgatgttaattatcactaaattaagaatgcaacctgagttacaggcagatgctatatcgatgaatcctgtatttatttttgttggtgttataatcattttaatttggctagtactggatatatatcgcaagaaaaaatacggtatattcttattcaagacgatagtgccactagttgttacgacttggattattatagttacaattatactttcgtaaacgattttgattaatggggaatttagagaacatttctttgtaattttataatcgaataacatacaaaataaagcgaccaattttgcagtgttacgaattgtaaactgcgaactggtcgctttttattgatgtcatgattaatttaatggatgtaattatatgatgaaacttctgaagcagagatggttcttgatgaaacgatatattcaccaatccagttcatttctgaaattagaatacttccatcaatattaactttctcaacgtaggctacatgaccaaatggaccatttactgtttgtaaaattgatcctcgtgttgggtgtctatctactttgaagccattgcttgaagcttggcctgcccagtttttagcatctccccaaaatgtactaatcgtgtgtccatctttggcgcgtttatcaaagacataccatgtacattgtccagcagtatataagttgttcttacttgtgataagaggttgatcaatgattttaccgttacctaaagctaaaggtttaccgtcagcagtctttgctttgtcattaaattcggcgatttgtaattcatcatacaattcgtctaaatcgatgcctgtaataagccctttgttatcttttgaaaaagcgttatttaattcatcgtcattgtcttcgacattcggtattgctggtgtcaaaggattgcttggtgacgtttgaggcggtgtgtgtgaatcaattgcgtcattaatgtgcgtatactgaccacttaatgaagaatggtactgattgttgttaagatcacgttgatttgcgtgttgatgattgtcgtttgtacgtgactgattttgatgattgttgtttggcgcgttgtttttgtcgtatgtataagtatacgcgccggtgtctttattcactttgaattgtgcgtttgggtgtgctttctttgcttcttctaatgttttgctatcattcgtgtatgcttgagccgagttaggcgacatactaaataaagtaagagttgtcatcgtcagtaaaattgttttcttcataataaccatttaatcctttatgtatttaatttaattttagtatacacatttatattacaaaaatgaatggttaattaaaaatatatgggtatattcaatatatttatttaaaaaaagctaaaaatacttaaaaaactatatacatatactaataatttatatattatttgagtaaggagcactttttcaaaaaatagtgtccctaaaaagttttgataaacttaaaatattcaggaggtttctagttatggcaatgattaagatgagtccagaggaaatcagagcaaaatcgcaatcttacgggcaaggttcagaccaaatccgtcaaattttatctgatttaacacgtgcacaaggtgaaattgcagcgaactgggaaggtcaagctttcagccgtttcgaagagcaattccaacaacttagtcctaaagtagaaaaatttgcacaattattagaagaaattaaacaacaattgaatagcactgctgatgccgttcaagagcaagaccaacaactttctaataatttcggtttgcaataagcattctgaaattggcaaagtcacattttctaatgtggctttgcttatcattttttaagaaaacaactgaaaggaaataagcatgaaaaagaaaaattggatttatgcattaattgtcactttaattattataattgccatagttagtatgatattttttgttcaaacaaaatatggagatcaatcagaaaaaggatcccaaagtgtaagtaataaaaataataaaatacatatcgcaattgttaacgaggatcaaccaacgatatataacggtaaaaaggttgagctgggtcaagcatttattaaaaggttagcaaatgagaaaaactataaatttgaaacagtaacaagaaacgttgctgagtctggtttgaaaaatggcggataccaagtcatgattgttatcccagaaaacttttcaaaattggcaatgcaattagacgctaaaacaccatcgaaaatatcactacagtataaaacagctgtaggacaaaaagaagaagtagctaaaaacacagaaaaagttgtaagtaatgtacttaacgactttaacaaaaacttggtcgaaatttatttaacaagcatcattgataatttacataatgcacaaaaaaatgttggcgctattatgacgcgtgaacatggtgtgaatagtaaattctcgaattacttattaaatccaattaacgacttcccggaattatttacagatacgcttgtaaattcaatttctgcaaacaaagatattacaaaatggttccaaacatacaataaatcattattgagtgcgaattcagatacgttcagagtgaacacagattataatgtttcgactttaattgaaaaacaaaattcattatttgacgagcacaatacagcgatggataaaatgttacaagattataaatcgcaaaaagatagcgtggaacttgataactatatcaatgcattaaaacagatggacagccaaattgatcaacaatcaagtatgcaagatacaggtaaagaagaatataaacaaactgttaaagaaaacttagataaattaagagaaatcattcaatcacaagagtcaccattttcaaaaggtatgattgaagactaccgtaagcaattaacagaatcactacaagatgaacttgcaaataacaaagacttacaagatgcgctaaatagcattaaaatgaacaatgctcaattcgctgaaaacttagagaaacaacttcatgatgatattgtcaaagaacctgatacagatacaacatttatctataacatgtctaaacaagactttatagctgcaggtttaaatgaggatgaatctaataaatacgaagcaattgtcaaagaggcaaaacgttataaaaatgaatataatttgaaaaaaccgttagcagaacacattaatttaacagattatgataaccaagttgcgcaagacacaagtagtttgattaatgatggtgtcaaagtgcaacgtactgaaacgattaaaagtaatgatattaatcaattaactgttgcaacagatcctcattttaattttgaaggcgacattaaaattaatggtaaaaaatatgatattaaggatcaaagtgttcaactagatacatctaacaaggaatataaagttgaagtcaatggcgttgctaaattgaaaaaggatgctgagaaagatttcttaaaagataaaacaatgcatttacaattgttatttggacaagcaaatcgtcaagatgaaccaaatgataagaaagcaacgagtgttgtggacgtaacattgaatcataaccttgatggtcgcttatcgaaagatgcattaagccagcaattgagtgcattatctaggtttgatgcgcattataaaatgtacacagatacaaaaggtagagaagataaaccattcgacaacaaacgtttaattgatatgatggttgaccaagttatcaatgacatggaaagtttcaaagacgataaagtagctgtgttacatcaaattgattcaatggaagaaaactcagacaaactgattgatgacattttaaataacaaaaagaatacaacaaaaaataaagaagatatttctaagctgattgatcagttagaaaacgttaaaaagacttttgctgaagaaccacaagaaccaaaaattgacaaaggcaaaaatgatgaattcaacacaatgtcttctaacttagataaagaaattagtagaatttctgagaaaagtacgcaattgctatcagatacacaagaatcaaaaacaattgcagattcagttagtggccaattaaatcaattagataataacgtgaataagctacatgcgacaggtcgtgcattaggtgtaagagcgaatgacttgaaccgtcaaatggctaaaaacgataaagataatgagttgttcgctaaagagtttaaaaaagtattacaaaattctaaagatggcgacagacaaaaccaagcattaaaagcatttatgagtaatccggttcaaaagaaaaacttagaaaatgttttagctaataatggtaatacagacgtgatttcaccgacattattcgtattattgatgtatttactatcaatgattacagcatatattttctatagttatgaacgtgccaaaggacaaatgaatttcattaaagatgattatagtagtaaaaaccatctttggaataatgtcattacgtcaggtgttattggtacaactggtttggtagaaggattaattgtcggtttaattgcaatgaataagttccatgtattagctggctatagagcgaaattcatcttaatggtgattttaactatgatggtcttcgtacttattaatacgtatttactaagacaggtaaaatctatcggtatgttcttaatgattgctgcattgggtctatactttgtagctatgaataatttgaaagcggctggacaaggtgtgactaataaaatttcaccattgtcttatatcgataacatgttcttcaattatttaaatgcagagcatcctataggcttggcgctagtaatattaacagtacttgtgattattggttttgtactgaacatgtttataaaacactttaagaaagagagattaatctaatgttgatgaatagcgtgattgctttaacttttttaacagcatctagcaataatggcggacttaatattgacgtgcaacaagaagaggaaaagcgaatcaataatgatttaaatcaatatgatacaacgctatttaataaagacagcaaagcggttaatgatgcgattgctaagcagaaaaaagaacgacaacaacaaataaaaaatgatatgtttcaaaatcaagcgagtcactcgactcgcttgaatgaaactaaaaaagtgttattttccaaatctaacttagaaaagacttcggagagtgataaaagcccctatattcaaaacaagcaggagaaaaaaatattcccgtacattttgatgtctgtaggggcttttttgactttaggatttgtcattttttcaattcataaagggagacgaacgaaaaatgaatcagcacgtaaaagtaacatttgattttactaattataattacggcacatatgacttagcagtaccagcatatttaccgataaaaaacttaatagctttagtattggatagtttggacatttcaatatttgatgtcaatacacaaattaaagtgatgacgaaaggtcaattacttgttgaaaatgatcgactcattgattatcaaatcgctgatggagatattttgaagttactataggaggaaaaatagatggttaaaaatcataaccctaaaaatgaaatgcaagatatgttaacgcctttagatgctgaagaagcagctaaaacaaaattacgcttagatatgagagagattcctaagtcttcaattaaaccagaacattttcatttaatgtacttattagaacaacattctccatattttatagatgctgaattaactgaactacgtgacagtttccaaatacattatgacattaatgacaatcatacaccttttgataatattaaatcatttactaaaaatgaaaaattacgttacttactcaatatcaaaaatttagaagaagtaaatcgtacacgctacacatttgtgttggcaccagatgaattatttttcacaagagatggattaccaattgctaaaacaagagggttacaaaatgttgttgatccattacctgtgtcagaagctgaatttttaacaagatataaagcactggttatctgtgcattcaatgagaaacaatcatttgatgctttagttgaaggaaacttagaactacataaaggaacgccatttgaaactaaagttattgaagcggcaactttagatttactaacggcatttttagatgaacagtatcagaaacaagaacaagattatagtcaaaattatgcatatgtacgtaaagtaggacataccgtttttaaatgggttgctatcggtatgacaacgttaagtgttttattaattgcattcttagcctttttatatttttcagtaatgaagcataatgagcgcattgaaaaaggataccaagcatttgtaaaggatgattatacgcaagtactaaatacgtatgatgatttagatggaaaaaaattagataaagaggcactttacatttatgccaaaagttatatccaaacaaataaacaaggtttagaaaaagataagaaagaaaatttacttaataacgtgacaccaaattcaaacaaagactacttgttatattggatggaattaggacaaggacatcttgatgaagcgattaatattgccacttatttagatgataacgatattacaaagttagcgttgattaataaattaaatgagattaaaaataacggagatttatcgaatgataaacgttctgaagaaacgaaaaagtataacgataaattgcaagatattttagacaaagaaaaacaagttaaagatgaaaaagcgaaatctgaagaagagaaagcaaaagcgaaagatgagaaattaaagcaacaagaagagaacgaaaagaaacaaaaagaacaagcacaaaaagataaagaaaaacgccaagaagctgaaagaaaaaaatagtataggactgaggcaaagacaatgcataaattgattataaaatataacaaacaattgaagatgctcaatttgcgagatggtaagacatatactattagcgaagacgagcgtgcagatattacgttgaaatcgttaggcgaagtcattcatttagaacaaaataatcaaggtacttggcaagcgaatcatacttctattaataaggtgcatgttagaaaaggtgaccttgatgacattacattacagctttatacagaagctgattatgcatcatttgcgtatccttcaattcaagatacgatgacaattggaccaaatgcatatgatgatatggttattcaaagcttgatgaatgccatcattattaaagattttcaatcaatacaagaatcacaatacgtacgcattgtgcacgataaaaatacagatgtatatattaactatgaactacaagagcaattaacgaacaaagcttacattggtgatcatatttatgttgaagggatatggctcgaagtacaagctgatggtttaaatgtattgagtcagaatacagtggcatcgtcattaattcgcttaacacaagagatgccacatgcacaggcagatgattacaatacgtaccatcgttcgccaaggattattcaccgtgaaccgaccgatgatattaagattgaaagaccaccacaaccaatacagaagaacaatacagtgatatggcgttccattataccgccattagtaatgattgctttaactgttgtcatctttttagtgagaccaattggtatttatattttaatgatgattggtatgagtacagtaacgatagtatttggtattacaacgtatttctctgaaaagaaaaagtataacaaagatgttgaaaaacgagagaaagattacaaagcttatttggataataaatctaaagagattaataaagcgattaaaacacaacgttttagtttgaattatcattatccaacggttgctgaaattaaagatatcgttgaaacgaaagcaccaagaatatatgaaaaaacatcgcatcatcacgatttcttacattataagttaggtattgcgaatgtagaaaagtcattcaaattagattaccaagaagaagaatttaaccaacgtcgtgatgaactattcgacgatgctaaagaattgtatgaattttacacagatgtagaacaagcaccattaatcaatgatttaaatcatggaccaattgcatatattggtgcacgacatctcattttagaagaattggagaaaatgctaatccaattgtcaacgttccatagttatcatgatttagagtttctatttgtgacacgtgaagatgaagttgaaacattgaaatgggcacgttggctgccacatatgacattgagaggtcaaaacattagagggtttgtttacaatcaacgaacgcgtgaccaaattttaacgtcaatttatagcatgatcaaagaacgaatccaagctgtgcgtgaacgcagcagaagtaatgagcaaattattttcacaccgcaattagtgtttgtcattacagatatgtcattaattattgatcatgtcattttagaatatgtaaaccaagatttatcagaatatggtatttcattaatctttgttgaagatgtgattgaaagtttgccagagcatgtagataccattattgatatcaagtctcgtactgaaggcgaactgattacgaaagaaaaagaattggttcaattgaaatttacacctgaaaatattgataacgtcgataaagaatatatcgcgcgacgtttggcgaatttgatacacgtcgaacatttgaaaaatgcaattcctgatagtattacatttttagagatgtataacgtgaaagaagtagatcagcttgatgtggttaatcgatggagacaaaacgaaacatacaaaacgatggcagtacctttaggtgtaagaggtaaagatgatattttatcattgaacttacatgaaaaagcacacggaccacatggtttagttgctggtaccactggttcggggaaatctgagattatccaatcatacattttatcgttagctattaattttcaccctcatgaagttgcattcctattgattgactataaaggtgggggtatggcgaacttatttaaagatttagtccatttagttggtacgattacaaacttagatggcgatgaagcgatgcgtgccttaacatcaatcaaagccgaattgagaaaacgtcaacgtttattcggagagcatgatgttaaccatattaatcaataccataagttatttaaagaaggtgttgcgacagaaccaatgccacatttattcattatttccgatgagtttgccgaattaaaatcagaacaacctgattttatgaaagagcttgtatcaacggcacgtattggacgttcgttaggtattcatttaatacttgcgacacaaaaaccatcgggtgttgttgatgaccaaatttggtctaactctaaatttaaattggcattaaaagtacaagatagacaagacagtaatgaaattttaaaaacaccagatgcagcagacattacattaccaggtcgtgcgtatttacaagttggtaataatgaaatttatgaattgttccaatctgcatggagtggagcaacatatgacatcgaaggcgataaattagaagttgaagataagacgatttacatgattaatgattatggtcaacttcaagcaatcaacaaagacttgagtggacttgaagatgaagaaacaaaagaaaatcaaactgagttagaagcggttatagatcatatcgaatctattacaacacgattagaaattgaagaagttaagcgtccatggctaccaccattgccagaaaatgtatatcaagaagatttagtagaaacagattttagaaaattatggtcagatgatgcaaaagaagtggaattaacattaggacttaaagacgtaccagaagaacaatatcaagggccgatggtattacaattgaaaaaagctggtcacatcgcgttaatcggaagtccaggatatggtagaacaacgttcttacacaacattattttcgatgttgcaagacaccatcgtcctgatcaagcacacatgtacttgttcgatttcggtaccaatggtttgatgccagtcacagacataccacatgtcgctgattactttacagtagatcaagaagacaagattgcgaaggcgatacggatatttaatgatgaaatcgatcgccgtaagaagattttaagtcagtatcgtgttactagtatttctgaatatcgaaaattatctggtgaaacaattccgcatgtctttattcttattgataactttgacgcagtaaaagattcacctttccaagaagtttttgaaaatatgatgattaaaatgacgcgtgaagggctagcattagacatgcaagtaaccttaactgcctcaagagctaatgctatgaaaacaccaatgtacattaatatgaaaacacgtatcgccatgtttttatatgataaatcagaggtgtcgaacgtagtaggacagcaaaaatttgcggttaaagatgtagtgggtcgagcattgttaagtagcgatgacaacgtatcattccatatcggccaaccatttaaacatgatgagaccaaatcatataatgatcaaattaatgatgaagtatcagcgatgacagaattttataaaggtgaaacaccaagtgatattcctatgatgccagatgaaattaaatatgaagattacagagaatcattaagcttaccggatatagttgctaatggtgctttaccaattggattagattatgaaggtgttacactacaaaaaattaaattaactgaaccagcaatgatttcatcagaaaatccgagagaaattgcgcatattgccgaaattatgatgaaagagattgacatattaaatgaaaaatatgcgatttgtatcgcagactcaagtggagagtttaaagcttataggcatcaagtggctaactttgccgaagaaagagaagacattaaagcgattcatcaactaatgattgaagacttaaaacaaagagaaatggacggtccgtttgaaaaagattcactttacattatcaatgattttaaaacatttattgattgcacgtatattccggaagatgatgttaaaaaacttattacaaaaggaccagaacttggcttgaacattttatttgtcggcattcataaagaattaatagatgcttatgataaacagattgatgttgcacgtaaaatgattaaccaatttagtataggtattcgtatttcagaccaacaattctttaaatttagatttattcaacgagaaccagttattaaagaaaatgaagcatatatggtcgcaaaccaagcttatcaaaagattagatggtttaaatagcaatgaattaaataggagggaggtatgttatgaattttaatgatattgaaacaatggttaagtcgaaatttaaagatattaaaaagcatgcagaagagattgcgcatgaaattgaagttcgttctggatatttaagaaaagctgaacaatataagcgattagaatttaatttgagttttgcactagatgatattgaaagcacagcaaaggacgtacaaactgcaaaatctagtgctaataaggacagtgtaactgttaagggaaaggcgcccaatacgttatatattgaaaaaagaaatttgatgaaacaaaagcttgaaatgttgggtgaagatatcgataaaaataaagaatccctccaaaaagctaaggaaattgctggcgaaaaggcaagtgaatattttaataaagcaatgaattaatattgaggtgaagatatgggtggatataaaggtattaaagcagatggtggcaaggttgatcaagcaaaacaattagcggcaaaaacagctaaagatattgaagcatgtcaaaagcaaacgcaacagctcgctgagtatatcgaaggtagtgattgggaaggacagttcgccaataaggtgaaagatgtgttacttattatggcaaagtttcaagaagaattagtacaaccgatggctgaccatcaaaaagcaattgataacttaagtcaaaatctagcgaaatacgatacattatcaattaagcaagggcttgatagggtgaacccatgatgaaagatgttaagcgaatagattatttttcttacgaagaattaacaattttaggtggtagtaaattacctctcgtaaattttgaattgtttgatccatcaaattttgaagaagctaaagctgctttaattgaaaaggaattagtaacagagaatgacaagttaactgatgcaggttttaaagtggctacattagtcagagagtatattagcgcaattgtaaatattcgaattaatgatatgtattttgcaccatttagctatgaaaaagatgaatatattttgttaagccggtttaaaaataatggatttcaaatacgaattataaataaagacattgcatggtggtcgattgtacaatcatatcctttattaatgagacaagaaaagtccaatgattgggactttaaacaaattgacgatgaaacattggagaacttaaataatgaaagtatcgatacgattgggcgtgtgttagaaattgaaatatacaatcatcaaggtgaccctcaacaaagtttatataacatttatgaacaaaatgatttgctactcattcgatacccattaaaagataaagtactgaatgttcatattggcgtcattaatacatttatacgagaattatttggattcaatactgatgaaaatcatattaataaagcagaggagtaatgacgttgagtgggaaaattagtgttaaagctgaaacgattgcacatgttgtaaaagaattagaaagcattagtcaaaagtatgatgaaatagctcaaaactttgggaaaatagcgcaattaaattactacagtagtgaaaaagctgcacattctatggaaaatggctatagtagtgctgcaacagtcattagtggtctcaaaggtccattgagtacactcggtggtggcgtcatgaattcagcacaaaagttctttgaagcagatgaacattggggtacggaatttgccaagctttactataatattgaaggataggtgcatgacatgacaaaagatattgaatatctaacagctgattatgataatgaaaagtcatctatccaaagtgtaatagatgcaatagagggtcaagacttcttagatgtagatacaacaatggatgatgcggtaagcgatgtcagttctttagacgaagatggcgcaatatcattaacaagttgtgtagtaggtccacaaggatctaagttaatggggtattatcaaaatgagttatatgattatgcatctcaattagattcgaaaatgaaagaaattattgacacgccatttatagaagatatagataaagcattcaaaggtataacgaatgtcaaattggaaaatatattaataaaaaatggcggtggtcatggtagagatacctatggggcttctgggaaaattgcaaagggagatgccaagaaaagtgacagcgatgtttatagcatcgatgaaatattaaaatcggatcaagaatttgtaaaagtaattgatcagcattacaaagaaatgaaaaaagaagataagaaattatctaagagtgattttgaaaaaatgatgactcagggcgcttcttgtgattacatgacagtagctgaagcggaagagctagaggagcaaaagaaaaaagaattggcagttgatattttagcgggtgtcggaattatagctttaactatagtcaaccctgtcgcaggtgcagtagcagcaggtgcatataccgcttattcagcagccaatgcagccacaggaaaaaatattataactggaagaaagctatctaaagaagaacgcatcatggaaggactttcgcttattccgttgccaggtatgggcttcctcaaaggtgctgggaaaagtttaatgaaattaggcttcaaaggcggagaaaaatttgcagttaaaacaggattgcaaaagacaatgcaacaagcagttagtcgtatttcacctaaaatgggaatgatgaaaaacagtgtgttgaatcaatctcgtaactttgctcaaaatactcatgttggacaaatgctgagtaacatgcgtggtcaagcaactcatactgttcaacaaagtagaaattggattggacaacaagcacaaaatgtcaaacgaatagtgaataatggacttgataaagaaatagcacatccatttaaacaacaacttgcaccagcgggaatgggtggtataaaatttgctgaaacaactactttgagaaacatgggtcaaaacataaagcgtgctgttacaccacaaaatcacgtgacacatggtccaaaagatagtatggtgagaagtgaaggtaaacatagtgtaagtagccatgaaattaattcatcaaaatatgttgaatcaccaaactacacgaaggttgaattcggaaaacactatgcaagacttagacctaagaaactaaaggcgaatattgaatatacaacgcctaatggtcacatatatcggactgatcataaagggcgcataaaagaagtttatgtagacaatctctctctaaaagatggagatcgtaataactatgcgcaaaaaactgtaggtggagaggatagattaccagacgatgatggaggtcatttaattgctagaatgtttggtggttcaaaagacatagataaccttgtagcacaaagtaaatttatcaaccgtccatttaaggaaaatggtgaatggtatgatattgaaaaagaatggaaaaatgctattaattttggaaaggaagtaaaaaatattaaaattgaagtgaaatataatggtaatagtcaacggccaactatatttaaggttggatatgagattaataatgaacgaaaagttaaaacaatagaaaacatatagaggtgttagtatgggatttgaaggtaagttaagtgaaatatacaacaagattgcgaatgagattgatggcatgataccagtagagtgggaaaaggtatatacgatagcctatgtaaatgatagaggaggggaggtcgtttttaattatactaaaccaggtagcgatgaattgaattattacacgaatatatctagagattataatgtttcagaggaaatatttgatgatttatggatgaatttgtattacttgtttaagaatttaaggaatttatttaaagaagaaggactagaaccatggacatcatgtgagtttgactttacaagagacggtaaattaaacgtatcttttgattatattgattggattaaattaggcttaggtccattagctagagaaaattactataaatataaaaaatttggaattatgccagaaatggattatgaaatggaagaaattcgagaagtagagaaatatgttaaagagcaagaagaagaatagacaatcttaatgtgagactaaacaataaagctttgtttagtctttttggcggttaagtaaaaaacaatatagaccgtaaagttgatactcatcaaataataatataaagataattttatgctttttgtagatgaaaatctaagtatatatagctttaaatacgtaatatgctattacaaaatcaatgtataggagataggtaaatatgactactaaggaaaatatagacattcttcgaaagccaggtgcacaagccttaagtttagcatctttatttatgatacttttttcatgtctaactttcttttttggtttagattatgaaaggtttcctaattatttaaagataacgacaattatagaattaataattatcataattagtttacttcaatggattagatttatagatttcgaaaaggaaagcgcacagaaatataaaaaaatatatgcccgatttttagtcgttataaatgtgctaactactatcactgcagtatttgcaacatgtaatctttactattttgttgctttacaaaatcattatgacctattcaattattggttgatgggcacgatttcaatcataattagctatttgttattagtaattggcggaatgttcacgttattaaaattacctaaagtaacaaaacgttggggtggtaaaactaaaacccattttggtttattattaaccgcgttgagcgcatttatatatattgaaagaattatcgaatatatgttggtgcccaatgttgtagaatccaagtttgtcataatggtaagtatcattattattgtttgtacacaatttgtagcctttcaatttattatgcaatacagtagattctatatttttgaattaaacactgaagatgatgactaaataattttataaattactattggagtatacttatataaaaaatcaacttcaacgtatatcaccatattattttacactcaatgatgtgaaagaatttgagtggattgatattaatgggatttgatttttagaattagaaaaggaacgcttgcttttgttgtaataagtctaatagttttcagttgtcggttattattctgaatatgattttatcaatattattataattgtattacatatagttgtcggtaaatttttatttacgaaatggtaaaaaagtatatactattaatatcttttttactataattataaatagttaaataaattgaaagacaaaataatgagtaggagttttatggttattatttacaaataatataatactaaaaaagactcgaaattatttggaattccagttatcgtaacaatagttgcagttattttagttccattagtgaatttaggtatgaaatgagtaatattaatttgaagaagcattaagtgacgtagaggtgttgtttagtgctttttatttaacggaaatgaaaccaatatctattttgaaaatataggggtgataacatggctttcgaagaaaaattaagtgaaatgtataacgagattgcaaataagattagcagcatgataccagtagagtgggaaaaagtatatgcaattgcctacgtagatgatgaaggtggggaagtcatttttaattatactaaaccaggtagcgatgaattgaattattatacatatatccctagagagtataatatctctgaaaaagtattttatgatttgtggacggatttatatagattgtttaagaagttaagaagcgcatttaaagaagaagatttagaaccatggacatcatgcgaatttgactttacaagagacggcaaattgaatgtatcttttgattatattgattgggtgaattcagaatttggaccaatgggaagagaagattattacatgtataaaaagtttggaatttggcctgaaaaagaatatgcaataaatagggttaaaaaaatagaagattatattaaagaacaagaagaaactgaactataggggagataatatgactttcgaagaaaaactaagtcaaatgtataacgaaattgcgaatgagattagtgggatgatacctgtagaatgggagcaagtatttacaatagcttatgtaactgatcaagctggagaagtcatttttaattatactaaaccaggtagtgatgaattaaattattattcagacatacctaaagattgcaatgtctcaaaagatatttttaagaattcatggtttaaagtttatcgaatgtttgatgagttaagagaaacttttaaagaagaagggcttgaaccatggacatcatgcgaattctattttacaagagatggcaaattgaatgtatcttttgattatttagattggataaatacagagtttgatcaattgggccgtgaaaattattatatgtacaaaaagtttggtgttttaccagaaacggaatatgaaatggaagaaattaaagaaatcgagcaatatattaaaagccaagaaagttaattataggaaagaggttaactaattaaaggagcaataatggaaaaaataaagaaaataaacaaaatatttttatcatttgaagttattccatttgcaatgatgattttgctagcatttctaccagttattgcaggtataataaataatcgtttgcagtatggtagggattttggcgatagagtaagcttttattgttatatttcaattatggttgcatatgcaattaccatattgttagaaattattttttactttattttattgaaaaactatcaatatgatcaaagtaatattgaattagctaatagagtgaaagttacaaaagtactgtcgattttgtatatcattccaggattatatgcgattccattctattttagatttttacatgttcgctcatttagagaaaataaaaaatctggacagcctgcttaccacttttgggaattttttataaaacctaatcgcaaacccatagagttgaaagacttttttattaaaaatagataattaaggagtaaccaatgaaaagattatgcataggattgttaattataatgatgagtataataaattatggttgtggtaatgagcaaaatgaaaataaatatcaaagtcaaattaataaagtaatgaaaattcaacaagaaactcataaagagatggttaaaaagagtaatgaagttaatcctgaatttaataaggataaagtaaatacttatgtatttaatgatggcaaattaattatcatcagctataagttatttaaagataaagatcaaatgttttacgcgacttacgagtttaaaaacgacaaaatttattataagagagatattaatcctaaaacatacgtgaaagaacaccaaccagattataaagatattaaagtaaaataatttaaaggagtaagaaaatggaaaaattaatcaaagtgacgtctttaattggaattattattcaaagttttttaacattgttatttttaatatttttaattttatcagcaacagggattatacagccagaattgaccacaactgttaatggtgaacaaactatacaaagcccagaaactgctcaagcaacattcgtgacaatatttgcaatattatttgttgtttctttagcttcagatttattaggcattatagctatgaaaaagttgtttgtgaataatagagcgagtggcattttgtatattattggtgcagtgatcagtgccaatttattaacatttattgcttggttaataagtgggatttctgttttaagatataacaaaataggaaaagaagtgtcatagcatgaaatatacttggtggatacttttaacaattgcagggattttaagtttaacaagtgtttatggatttattttatgtttaggtagctttggaatgttggcactgaatgtcatgtggctatttgtttatacaccgcataaaaattctaaagcacttgaatctatatcaaaaccaacgataattttatcaatcattgggacatatgcagtatttatatttatgcctatcttattttacttcgtaatgaaagctaggtttatggaaattggaataaaactttacggtgaatcttttaatatgtttggaataccattattcataattgctatcattttatttacaatcggtacagtattcgtttataaaatacagcaatcaagattaaagcaatagaatatattaatttaaaatgggacgggtttaaaagaaatccgtcctaatgatttatacataatagatgtagctgaatctaaaagacttcaaatactttgaagataaaaagataatgacagtgaatgtaaaatgtgattttttcaatattaaaatataaaaatgtaatagtttagaaagcgaatctaaattttaataatgattaatgaaaggtagatgaacatgagtaactcaaacgagtttgttaaatttgcccttcatttatttgcgttgaaaatcacgaggctgtttccatttccgaaaaatggaaacgagtattgtaagtaaaaaatctcatggatacaaggcgattatatagtttcaagatgatgaaccaatttagggtgaaaatttaaatggatgcatatatttagattttactgaattgtaaaaatagaataataagttatttgaatgtatttataaatatatcgttattattaaagtagagattaggggcgataacatgactttcgaagagaagttaagtcaaatgtacaacgagattgcgaatgagatcagtggaatgataccggtagagtgggaaaaagtatatacaatggcttatatagatgatggaggaggtgaagtattctttaattatactaaaccaggaagtgaagatttgaattattacaccgatatacctaaggagtataatgtttctgtgcaagtatttgatgatttatggatggatttatatgatttgtttgaggaattaagaaatatatttaaagaagaaggacatgaaccatggacatcatgcgaatttgattttacaaaagaaggtgaattaaaagtttcatttgattatatagattggatcaatacagagtttgatcaattgggccgtgaaaattattatatgtacaaaaaatttggggttataccagaaatggaatatgaaatggaagaaattaaagaaatcaagcaatatattaaagagcaagatgaagctgaactataggggagataatatgactttcgaagaaaaactaagtcaaatgtacaatgaaattgcaaataaaattagcagtatgataccggtagaatgggaaaaggtatatgcaatggcttatgtaaatgaaagaagtggagaagtgttctacaattatactgaaccaagaagtgatgaattagtttactatacgagcgtgttaaataaatataatatatcaagatcagaatttatggactcagtatatgaattatataagcaatttgataaactaagagatttatttaaagaagaaggacatgacccatggacatcatgtgaatttgactttacaagagacggcaaattgaatgtttcatttgattatattgattgggcgaattcagagtttggacaaatgggaagagaacattattacatgtataaaaaatttggaatttggcctgaaaaagaatatgccataaattgggttgaaaaaataaaaaattatgttaaagagcaagaagaaactaacctttaggggagataatatgactttcgaagaaaaactaagtcaaatgtataacgagattgcgaatgagattagtgggatgataccaatagagtgggaaaaggtatatacaattgcttatgtagatgatgaaggtggagaggtcgtttttaattatactaaaccaggtagcgatgaattgaattattacacatatatccctagagagtataatgtctctgaaaaagtattttatgatttgtggacggatttatatagattgtttaagaagttaagaaatgcatttaaagaagaaggacttgacccatggacatcatgtgaatttgattttacaagcgaaggtaaattatacgtatctttcgactatatagattggattaaattaggttttggcccatcaggaaaggaaaactattatatgtataaaaagtttggtgttttaccagaaatggaatacgaaatggaagaaattaaagaaatcgagcaatatattaaagagcaagatgaagctgaactataggggcgataatatgactttcgaagaaaaattaagtgaaatgtacaatgaaattgcgaatgagattagcagtatgataccggtagaatgggagcaagtatttacaatagcttatgtaactgatcaagctggagaagtaatctttaattatactaaaccaggtagtgatgaattgaattattattcagatatacctaaagattgtaatgtctctaaagatatttttaagaattcatggtttaaagtttatcgaatgtttgatgagttaagagaaacttttaaaaaagaagggcttgaaccatggacatcatgcgaatttgactttacaagagacggtaaattgaatgtatcttttgattatattgattgggtgaatttagaatttggaccattagcaaaagaaaattactatatgtataaaaaatttggggttataccagaaatggaatatgaaattaataaagttaaagaaatcgagcaatatgttgaagagcaagatgaagctgaaatataggggagataacatgactttcgaagaaaaattaagtcaaatgtacaacgagattgcgaatgagattagcagtatgataccggtagagtgggaaaaagtatatacaatggcttatatagatgatgaaggaggagaagtgttctactattacacagaacctggaagtaatgaattatactactatactagtttattaaataaatatgatatatcggaatcagaatttatggactcagcgtatgagttgtataaacaatttcaaaagttaagaaatatatttaaagaagaaggacatgaaccattgacatcatgcgaatttgattttacaaaagaaggtgaattaaaagtttcatttgattatatagattggataaatacagagtttgatcaattgggccgtcaaaattattatatgtacaaaaaatttggggttataccagaaatgaaatatgaaatggaagaaattaaagaaatcgagcaatatattaaagagcaagatgaagctgaaatataggggcgataatatgactttcgaagaaaaattaagtcaaatgtataacgagattgcgaatgagatcagtgggatgataccagtagaatgggagcaagtatttacaatagcctacgtagatgatgaaggtggagaagtcgtttttaattatactaaaccaggtagcgaggaattgaattattacacatatatccctagagagtataatgtctctgaaaaagaattttatgatttgtggacagatttatatagattgtttaagaagttaagaaacgcatttaaagaagaagatttagaaccatggacatcatgtgaatttgattttacaagagagggtaatttgaaagtatcgtttgattatatagattggattaaattaggttttggtccatcaggaaaggaaaactactatatgtataaaaagtttggtgttttaccagaaacggaatatgaaattaataaagttaaagaaatcgagcaatatgttaaagagcaagaagaaactaacctttaggggagataatatgactttcgaagaaaaactaagtcaaatgtacaacgagattgcgaatgagatcagtgggatgatacctgtagagtgggaaaaggtatatacaattgcctatgtagatgatgaaggtggagaagtcgtttttaattatactaaaccaggtagcgatgaattgaattattacacggatatatctagagattataatatttcagaagaaatatttgatgatttatggatgaatctttattacttgtttatgaatttaagggatttatttaaagaagaagatttagaaccatggacatcatgcgaatttgactttacaagcgaaggtaaattaaacgtatcttttgattatatagattggattaaattaggttttggcccatcaggaaaggaaaactattatatgtataaaaagtttggtgttttaccagaaacggaatacgaaatggaagaaattcgagaagtagagaagtatgttaaagagcaagagtagcagacatgttataaaaggctgtgcaaaaccaaccttgttttacatttgactcaaagaagaaggtaaaagataagattatttgcaacttaaaaagtcaattagcttatcggtatccttacatcatggataaatgagttcaactaattaacaaatcacgatataaatttaaaattgtcattaattgcaaaggttattgtagtgtattttataaagttgatgtacatcgacttattttttaaaacttatatcaaaaaaatgagaaaagtatatactattaaaatgttttttactataattataaatagttaaatatttggttatgaaataaatgtgtgggaggcaatttttagagatacatagcaatgtaaaggtatcaaatagttattgcataatttattatgatgacataattttcagtagataattgtaaattaatactgaaatagatgtttatattaagaagactttaatatcataattaatcaaaatcttgcgtcaaacatttaaacgaattttaagtttataacaattggttaaacattgttcaaacattacaatgataaagcatattatcagtattgtagtgtgtggaaaatgacagccatctaaggagaaaaatgatgaaaagaatattggtagtatttttaatgttagctattgtattagcaggttgttctaataaaggtgaaaagtatcaaaaagatattgataaagtgtacaaagaacagaatcaaatgaataaaattgcctcgaaagtacaaaacactattaaaacagacattaaacaagaagacagtaatacacatgtttataaagatggtaaagtcattgttattggtattcaattgtataaagatcgtgaaaaaatgtattatttcgcatatgaaataaaagatggtaaggcagagatcaatagagaaatagacccaattaagtatatgaaagaccataaagcagattatgaagatgaaaatgtagaagtggaaaaaaattaacgtatgctttctttaaaacttttaaccattttcaaaaataaatgaactttagcgacaataattttcacaataaacacgatataaatttaaatatttatatataagaacacaaacgtaagtttgtaaataataataaaggagtaagacaatggaaaaatcgatcaaaataatgacaataataggtatttcagttcaaggtttagcaactatatttagtttactatttatggttttagcagcatcaggggcaatgactacagatgtgtcaacaacagttaatggtgaggttgacccagttgatgcagaaacagcagcagcaattttcactgtattattcttattcctattcatatttggaatcatttcaattattttaggtgcaatcggtatgtttaaagcatctaaaaacaaaaaaatgagtggtatattgttgattattggagctgtaataagtggtaacataattacatttgctttatggttagtcagtggtattaaactccttactaataacaagcctaaagatgaaataagcgacttatcataaatatcatatattgaaatttcaagatttcttaagtaattatatttctggtagtttttaacaaattaaccaattaaataaagtgctctcttagaagtagatgttcagtcaatagctgcttttaagagagcactttgtatttgataatgctcatggcatcggacaaaaaccattgacgagctttaaaaaaatacgttagacaatgcacttctaaatattaaaggcatcgactaacgcattgttcaaatagagttaattatttttataaaattgatgatgatcattcaagtaagcatagaataaacctataatgagtccgcctccaatatagttgccgataaaagccgcagcgatattcgaaatagctggtatgaagtgcaatgtatcaacttgataaattaagcctcccataaataagcaactgttgtaaactacgtgttcataacccataaaggcgaatatggtaactccgaacatcatgacaaacatttttgcgagtacatcgtcaatttgcatggcaataactaatgaaatattgataaagaaattggcgaatatcgctttcattaatatacttacaaaaccagtagacaacgttttatgctcaataactgctgataactgatttaacatatctggcgtcattacatttgaaaaacgcatgaaactaaataaaatagcagcacctaaaatatttcctgcaaagcacaataaaaatattttcaatactctagtcggtttaattactttataatacaggcctacagtaaagtacatgaagttactggttagtagttcggagtttgtaaataaaatgagtactaacgcaaagctgaatgtaatggcactggccatattcacaatgcctggcggtaaatctggttcgtgtgttgctttaactgataatacgaagaccgtaataatcccgataataaatcctgccatcatcgcgcgtaataaataacgttttaaataaacgctttgtaatatatcttttgttcttattgtttcgactacgttatttacccagtcgtccccataaaaaatcttatcccatttaatatgtttctccttcacaatgacatcctcacttttcatttgttaatcagagtatactatgaatcgccttatttgtgaataatttcacaaaattaattttaaaaactaatatttttgaataacagctaggattttttaacaaatcatttattttaaaataattaatcgtcagttagtatcaatgaataaatacagattttcatataaaaaagcctagtaacgagggggcaatcattactaggcagtgagcatttattaagttgtcgtttgtttcgggcggcgtatcaatacatcgattatgaaaccgataatagcaaagagcatgaatggtacaagccaagctaaatcgatatctgctaaaggtaacatcataaaccatttcaaaataacaccgtgtaataagttgaaactatttagtatttgtaaaattgaaataatcaatgtaataatagttgcgagtcgatatgcccaactgaatctgaatgtgctaaacatgttagcaaatgatatgagcacaagtgcgattgatacaggatatattaatgtcagcaatgggacagcaatttttaaaatcatttctaaaccaagtgttgtaaataagaaccctatgatagagaaaataagtgcgaatattttataagaaaacttaggtacgtgtttcttagtaaatgtggcgcaagcattgacgagtcctatacatgttgttaaacatgcaagtatcactgtcataccaaatactatgttgccaaatgaaccaaacactcgtaatgagttgtacgtcaatatatctgtaccatctttaaagtttcctggagctgttgatgccccaacgtatgcaagtgcaaagtaaatcattccaagtaatatggctgcaataagacctgaaaagcagacatattttaaaattttcatgcgatctgtgagccctttaaacttatagccattgacaatgactacggaaaaagctaacgcagcaacaaggtccattgtaaaatagccttccaaacttcctgaaatgaaaggatgtgttatatatttatccttaggtgcacttagtgcagattcagggttgaaaatgacagcaatacttaatagagcgaccattaatagtaataacggtgttaataatttacctaaattatcaacgattttcgatggatttaaactaatccagtaaacgatggcaaaaaagattgctgcgaatataattaaagtccattggttatgcacaggtaaaatgtgtcttgtaccaatttcgtacgcgacatttgcagcacgtggaataccgtaaaatgctccgatagacatgtaaatcacgacagcaaaaataaatccgaaccatgggtgtatacgattacctacactttcaacaccttcatcataaaatgcaacaacaataacagtaataaatgggagtaatatgcctgtaagggcaaagcctagcataccaatccacatattttgacccgctgtatggccaagcatgggcgggaatattaaatttccggctccaaaaaagagtgaaaataacatgaggcccgaaataataacttgttttttcaatgtaatttccttcctaaaactagatattcataataatttaaaaaatctgaaaaataaaaacgttcttactttatctttaaatcacaatactatgattctattattttataaaaaagattgcaataataataacttggcgttattggataatgacaattaaagtgtcgtttttatgaattaaaataggtgaaagtaagttggaaatacgttggagcgttgtgatttttatgagaaattgtatgagtgaggactgctatttataaaaggtaaactatggatgagtttatggttgttccaatagataaataagagatagcacactgtacacataatgatacgtggatgagtgaatatgtctgataggaaggcctagtcactcaaatgaattaaagtttattacgtgataaatcacaaatctctctcatgttataggtctccaattaaatcatgcttatatgaaatgttcacatatttgttagcttttcaagaaattatattaaatatctttgcatagtatagcaaagttaaataaatacatttataattttaactgtattttaaatattaatcatgaggtgataggatgaataaaatttcaaagtatattgcaatagcatcattatcggtagcggttacagtttcagcaccacaaacgacaaattctacagcgattgccaaaagttctgctgaagttcaacaaacgcaacaagcttcaatgccggcttcacaaaaagtgaatcttggaaatcagaatattatggcagtttcttggtaccaaaattcagctgaagcaaaagctttatatttgcaaggttataacagtgcgaaagttcaactagataaagaaattaaaaagaataaaggtaagcataaattagcaattgcattagatttagatgaaacagttttagataattctccgtatcaaggctatgcatcaatacataataaacctttcccagaaggttggcatgaatgggtacaagctgctaaagctaagcctgtttatggcgcaaaagaattcttgaaatatgctgatgaaaaaggtgtcgatatctactatatttctgatagagataaagagaaagatttaaaggcaacacaaaagaacttaaaacaacaaggtatccctcaagctaagaagagtcatattttactaaaaggtaaagatgataagagtaaagaatcacgcagacaaaaggttcaaaaagatcataaacttgtcatgctatttggagacaatttattagactttacagatccaaaagaagcaacagctgaatctcgtgaagctttaatcgaaaaacataaagatgattttggtaagaaatatattattttccctaacccaatgtatggtagttgggaagctacaatttataacaataactataaagctagtgataaaacaaaagataaattacgtaaaaattctattaaacaattcgatcctaaaacaggcgaagttaattaacatatgaattggacgtctacatgtacttataggtatatgtaggcgtttttaaattgttccttaattttaaatgtacagtacaaaagcaataggcaactaattgcattttccataaatttgcttttaataataaaagttcgggtataatgaacaataagtgtatatataacattacatagcgcaacttggcgtacgcgcatctaagaatataaataatgtttaaatcatagtagtagggagaggaatccatgtttttagcttggaatgaaatacggcgcaacaaattgaagtttggactgattattggtgtgttggcaatgataagttacttactttttctattgtcgggattagctaatggtttaattaatatgaataaagaaggtattgataagtggcatgcgaatgccattgtgttaaataaggatgctaatcaaactgtgcaacaatctatttttaataagaaagatattgaaaataaatacaagaaacaagctacattgaagcaaacaggggaaattgtttctaatggtcatcaaaaagacaatgtcttagtgttcggcgttgaaaagtcgtcgtttatagttccgagtctaatcgatgggcataaagcaactaaagataatgaagtgttagcagatgaaacacttaaaaataaagggtttaagattggtgacacattaacactatctcaatctgatgaaaaattgcatattgtaggttttacagaaagtgcaaagtataatgcatcaccagtcatttttacgaatgatgctaccatagctaaaattaatcctcgattaagtggcgataaaatcaatgcagttgttgtacgtgatgcaaattggaaagacaaaaaattaaatcaaaaacttgaagcagtaagtattaatgactttattgaaaatttaccaggttacaaaccgcaaaacttaacattaaactttatgatttcgttcttatttgtcatttcagcaacagtgattggtattttcctatatgtcatgacattacaaaagacgagtttatttggcatattaaaagctcaaggatttacgaatggctatttggcgaatgtggtaatttcgcagacggtcatattagcactattcggtacggcattgggattactattcacaggcattacaggtgcatttttacctgatgcagtaccggtcaaatttgatgtactaacattactcgtatttgcagttgtgttaatgattgtctccgtattaggaagtttattctccattttaacgattagaaaaatagatccgttaaaggcgattggataggaggtgtagcgaatgttgaaatttgaaaatgtaatgaagtcatttaaagatggtaatcgtacaattgaagcggttaaaaatacaaactttgaaataaataaaggtgatattgtagcattagttggaccttctgggtctggtaaaagtacatttttaactatggcaggtgctttacaaacgccgacatctggtaatattttaattaataatcaagatattacggaaatgaagcaaaaagcattagcgaaggtaagaatgtctgagatagggtttatattacaggcgaccaatcttgtgccatttttaacggtaaagcagcaatttaccttactgaaaaagaaaaataagaatgtcatgtcgaacgaggactatgagcaacttatgaagcaattagggttaaattctttactcaataaattaccgtcagaaatttcaggtggtcagaaacagcgtgttgcaattgcgaaagcattgtatacaaatccttctattatacttgcggatgaacccactgcatcgttagatactgaaaatgcaattgaggttattaaaattctgcgtgaccaagccaaacaaagagaaaaagcgtgtattatcgttacacatgatgaaaggcttaaggcatattgtgaccgttcgtatcatatgaaagatggcgttcttaatcttgaaaatgaaacagtagaataatttatcaagccggcacattgtgtgccggtatttttatatccatgtattatttgaataaactttcacattcaattaataataattattatcgaaaattagaaatattccgtgaaatataatattttttgtagtaaaatggcctctaagtattcaatatttgactatggggattgaatataaataatcataatgggggtcatgcttaatggatttattaataggtactttatttttatttttagtcttagtcatttttacattatttacatataaagcgcctaatggtatgcgtgctatgggcgcattggcaaatgcagcgattgcaacatttttagtggaagcatttaataaatatgttggtggcgaagtatttggtattaaatttttaggagagctaggggatgctgcgggaagtctaggtggtgtcgctgccgctggattaacagcattagctatcggtgtgtcaccagtatatgcattagttatagcagccgcgtgcggtggtatggatttattaccaggtttctttgcgggttatatgattggatatgtgatgaaatatacagagaaatatgtgccggatggtgtcgacttaattggatcgattgtcatcttagcgccattagctcgtcttattgcagtattattaacgccagtagtgaatagtacattgattagaattggtgatattatccaaagtagtacgaatacgaatccaattatcatgggtatcattttaggtggtattatcacggttgtcggcacagcgccattgagttcaatggcattgacagcattattaggtttaacgggtgtacctatggctattggtgccatggcagcatttagttcggcatttatgaatgggacgctattccatcgcttaaaattaggtgatcgtaagtctacgattgcagtaagtattgaacctttatcacaagcagatattgtatcagccaatccaattccaatctatattacaaatttctttggtggtgcgattgctggtttaattattgctatgtcaggtttaattaacgatgcgacaggtacagctacaccgattgcaggatttttagttatgtttggatttaatcatccgacgacaattgtgatttatggtgtagtaatggcgattgtaggtacgcttgcaggttatcttggttcaattgtatttaaaaaatatccaattgttactaagcaagacatgattaatcgaggtgcagtagacgcatagcatcatcatattgaatagtaaaaacaaataaaacatagtaacgtgattcagtcgatgtaacagtcgataatgagtcacgtttttttatagaaaaatataagacataaaaatgtcataatttatagtcgacaaatatcatactgtataaacatttatcattttctcaggtgccttttacgcgatggaatgaacttactttttacgaaattatgcgtattttataaacaaatatcattaatataacggtaaatgtaagcgtttacaacggaaataactgcatgctacgatatttttgtaaattcactgattcaagtattttaagtcaatatgaggagggatgttatgagcgattctgagaaagaaattttaaaaagaattaaagataatccgtttatttcacaacgtgaacttgctgaggcaattggattatctagacccagcgtagcaaacattatttcaggattaatacaaaaggaatatgttatgggaaaggcatatgttttaaatgaagattatcctattgtttgtattggcgcagcgaatgtagatcgtaagttttatgtgcataaagatttagttgcagaaacatcaaatcctgtaacgtcaacacgttctattggtggcgtagcaagaaatattgctgagaacttaggtaggcttggcgaaacggtcgcttttttatctgctagtggacaagatagtgaatgggaaatgattaaacgattgtccacaccatttatgaatttggatcatgttcaacaatttgaaaatgcgagtacaggttcatatacagctttaattagtaaagaaggcgacatgacatatggcttagcagatatggaagtgtttgactacattacgcctgaatttttaattaagcgttcacacttattgaaaaaggctaagtgcattattgtcgatttgaatttaggcaaagaggcattaaacttcttatgtgcctataccacgaaacatcaaatcaaattagttatcaccacggtttcttccccaaaaatgaaaaatatgcctgattcattacatgctattgattggattatcacgaataaagatgaaacagaaacatacttaaatttaaaaatagaatctactgatgatttaaaaatagctgctaaacgctggaatgatttaggtgttaaaaatgttattgtgacaaatggcgtgaaagaactcatttatcgaagtggtgaggaagaaatcatcaagtcagttatgccatcaaatagtgtgaaagatgttacaggtgcaggtgattcattctgtgctgcagtagtgtatagctggttaaatgggatgtctactgaagatatattaattgctggtatggttaacgcaaagaaaacgatagaaacgaaatatacagttaggcaaaacctagatcaacagcaactttatcacgatatggaggattataaaaatggcaaatttacaaaagtatattgagtattctcgagaagttcagcaagcacgggagaacaatcaaccgattgtagcattagaatcaacaattatatcgcatggtatgccgtacccacaaaatgttgaaatggcaacaacagtagagcaaattatcaggaataatggtgccattccagcaaccatagccattatagatggcaaaattaaaattggtttagaaagtgaagatttagaaatacttgcaactaataaagacgttgctaaagtgtctagaagggatttagcagaaattgttgcgatgaagcgtattggtgctactactgtagcgacgacgatgatatgtgctgcaatggctggtattcaattttttgttactggaggtattggtggtgtccataaaggtgcagaacatacgatggacatttcagcagacttagaagaattgtctaaaacaaatgtcactgttatctgtgcaggtgccaaatcaattttagacttacctaagacaatggagtatttagaaacaaaaggcgttccagttattggatatcaaacgaatgaattgccagcattcttcactcgcgaaagcggtgttaagttaacaagttcggttgaaacgccagaacgacttgctgacattcatttaacaaaacagcagttaaatcttgaaggtggtattgttgttgctaatccaattccatatgagcatgccttatcaaaagcatatattgaggcaatcataaatgaagctgttgttgaagccgaaaatcaaggtattaaaggtaaggacgccacaccgttcttgttagggaaaattgtagaaaaaacgaatggtaaaagtttagcagcaaatataaaacttgttgaaaacaatgcggcgttgggtgctaaaattgctgtcgctgttaataaattgttgtaggtgatgatacatgaatattttattcgctatcacagggatagcatttgcactatttgttgcgtttttattcagttttgatcgtaaaaacatagacttcaaaaagacgttaataatgatatttattcaagtgttgattgtgttatttatgatgaacacaacgattggtttaacaatcttaactgcattaggttcattttttgaagggttaataaatgttagtaaagcaggtataaactttgtttttggagatatacaaaataaaaatggctttacattttttttaaatgtgttgctgccattagtgttcatttctgtattaataggcatttttaattatattaaggtattaccatttattatcaaatatgtaggtatcgctattaataaaataactagaatggggcgcttagaaagttactttgctatttcaacagcaatattcggttagccagaagtatatttaactataaaagatattataccaaagttgtctagagcaaaattatatacaattgcgacatctggtatgagtgctgttagtatggcaatgttgggttcatatatgcagatgattgagcctaagttcgtagttacagcagtaatgttaaatatttttagtgcgcttatcatcgccagtgtaatcaatccctataaatctgatgatactgatgttgaaattaataacttaacgaaatccacagaaactaaaacattgaatggaaaaacaggaaaacctaagaaagttgcctttttccaaatgattggtgatagtgcgatggatgggtttaaaatcgctgttgtagtagccgtaatgttgttagcatttatttcattaatggaagcaattaatatcatgtttggtagtgttggtttgaactttaaacagcttattggctatgtgtttgcaccaatcgcattcttaatggggattccatggagcgaagctgttccagctggctctttaatggcgactaaattaattacaaatgagtttgtagcaatgcttgattttaaaaatgtcctgggtgatgtatctgctcgaacacaaggtatcatttcagtttacttagtaagcttcgctaattttggtacggttggtatcatcgtaggttcaattaaaggcattagtgatgaacaaggagagaaagttgcatcctttgcaatgagactgttacttggttcaactctagcttcaatcatttcaggatcaatcattggcctagtattgtaaattaatcgaagtatctaaattaaattcatggcaacatcaaaactccatcaccaagttggcgcaacagcgcattataacttagtgatggggttttatcataacaatctactttttcgtagccgtttttgaaatgtatgttgatggtttatctttttcaaaaattgttaatcccgttatatcttttttatgttttgaagggacaatgaagctaagtatataagcaaagacaaaagcaactgtaaatgaaatggtagatacatagaaaggtgagttacctttgccaacaccattatagacgtaagcaaagatgatacccaatattaatccacaaataacaccgaatgtattcgtacgtttagtgaaaataccaactgcaaatacaccagccaatggaacgccgaataatccagtcacaaacaagaataaatcccataagtcatttgaattagaagcaattaagtatagtgacattccaaaaccgaaaatacctgcaatgatgatgaccaaacgagcaaagttaacttcgtgtcgctcgctaccttttccgaagaagcgttgcttaatgtcgattgaaatacaagcagatatagaatttaaactagatgaaatggtagactgtgcagctgcgaaaatggctgcaataagtaatcctgctacaaatggtggcatctcagtcaaaatgaaatatggcacaacagatgacgtgttaaatccttttggtaaaacagcttcatgtgcataaaatgaatacaacattgtacccataccataaaataagggtgctgaaattaaagctaggataccatttgtccataacgatttatttgtttcttttaaactatcagaagcttgataacgttgcacgacgtcttgactcgccgtgtattgatacaaattattaaaaatatttcctaggaaaataattggaatggcagctgctgcagtatttagtttccaattgtctgcactaattaattttttgtgctcaatcgcatctgcaaagacagtgccaaaaccgcctttaatgttcataacaccaagaatgatgataactaaagcaccgcctaatagaatgacgccttgaatgaaatcactccaaaccacaccttcgaaaccacctaaaaatgtatataaaatacatagtaaaccaacgagtgatgcaacgatataagggttcatgtctgatacagatgtaatcgctaatgttggtaagtagataacgattgctacacgccctagatgataaactacaaatagtaaagagccaatgacacgaatgctaggtccgaaacgtgcttctagatattcatatgcagatgttacctttaactttttaaagaatggaacatagaaataaatgagtaatggaataattgctacgatagcgatgttacctgcaatatatgaccaatctgttaaaaatgctttctctggtgtagacataaacgtaattgcacttaatgtagtggcataaattgaaaagccaactacccaagatggcaagcgaccacttgcggtaaagaaactattcgtactttggctcgcacgcttggtaaaataaacgccaatgagtaacatagctagtagataaatgataacggcaacccagttcagtgtgccaaatccaacttctttcatggacaacatcccctttacaatgtattgattctttgatgtctataaatcgtattttgcaatgaggtgatctaatgtttgtcgatgtgcttcgttaaaaggtttgaatggacgtttcggtaatcctgcatcaatgccacggtgacgtaatatttctttcaatgttggataaatccccattgataacactgtttcgataatgtcgtttgaatcatgttgtagttggtaagcttcttgaatttgaccttgtcgtgctaagtcgaatatttttctagcgcggcgaccattaacgttatatgtagaaccaattgcaccatctacaccagaaatcgtagcttgaactaacatttcatcaaagccagataagattaatttgtctgggaatgcttttctaatacgttcgagtaggaagaagttcggcgctgtatatttaacaccaacaattttttcgtgattaaaaagctcgctgaattgttcaatagaaatattcacacctgttaaatctggtattgcataaataatcatattgttctgtgttgcttcgataatatcgaaatagtaatctctaatttcttcaaaagtaaatggatagtagaatggtgttacggcagaaagtgcatcataaccgagttctgtggcatattttccaagttcaatggcttcatttaaatctaacgaacctacttgagcaatcaatttcaccttatccccaactgcctctttggcaaccttgaaaacttgcttcttctgctctgtatttaataaaaagttttcgcctgagctaccatttacataaagaccgtctaattcttcagtttcaatggcattttgagcaatttgtttaagtccttgttcatttacttgaccattttcatcaaaaggaacgagtaacgctgcatataaaccttttaaatctttgttcattatgaagtccctccaaaaaatcatttgataatatagtttacagctataattgtaaacgctatcataaaatgtaacaatatctttttgaaaattgtagtcatatttatgtataattaatgaaaatatttttcaaaatcaatagaaatggagtgagtaaggtgtattacatcgcaatcgatattggaggcactcaaattaaatcggcagttattgataagcaattgaatatgtttgactatcaacaaataccaacgccggacaataaaagtgagcttattactgacaaagtatatgagattgtaacagggtatatgaagcaatatcagttgatccaacctgtcataggtatttcatcagcaggcgttgttgatgaacaaaaaggcgaaattgtatacgcagggccaaccattccgaattataaaggtactaattttaagcgattattaaaatccctgtctccttatgtcaaagtaaaaaatgatgtaaacgctgcattactaggcgaattgaaattacatcaatatcaagcagaacggatcttttgtatgacgcttggtacaggcattgggggtgcgtacaaaaataatcaaggtcatattgataatggtgaacttcataaggcaaatgaagttggatatttattgtatcgtccaactgaaaatacaacgtttgagcaacgtgctgcaacgagtgcattgaaaaagcgcatgattgacggaggatttacgagaagcacacatgtgccagtattgtttgaagcagctgaagaaggtgatgatattgcaaaacaaatattgaatgagtgggcagaagatgtagcagaagggattgcccaaatacaagtcatgtatgatccagggcttatattaattggtggcggtatatctgaacaaggagacaatctcattaaatatatcgaaccgaaagttgcacactatttaccaaaagactatgtttatgcaccaatacaaacgactaagagtaaaaatgatgcagcattatatggctgtttgcaatgatggttgaaagaaggagtcattctaaaatagaatttgaaaccgttacgagagatgagagctgttgttagttccacacatcacactctatctaggaccaatctaaactatatcaaccaacaatgtgccacgggcatattaaattgaagacgcttgaacgtatagatctcaaaaatgtaaaaaagtttttggtattgaaataaaaaaacacctagcaacttgttgggacaatcacgatgattgtctacagttgcaggtggatttgaatatactactagttatttgttgtctaggataatagatttagtatgttgataagtttgactcagatttgtattttctaataaatgataactcacaatatcgattaaaaagagtgtcgcaatttgtgtgttgataaattgatggtcggtattacgcgattgatccgttgttaaaagtactaaatctgcacaatctgtaagtttactaccttcgaaatttgtgatggcaacgacatatgcaccatgagatttggcgacttccgctgctgaaattaattctgaagtattaccactatttgacatagcaataaacatatccgattgagatagtagggatgccgatattttcattaaatgtgaatcggtagtaacattaccttttagccccatacgaatcatacgataataaaattcagtcgctgataaaccagagctacctagtccagcaaagagtatatgtcgacttgattgaagtttgtcgataaaggtttggataatgtcgttatcaataaattcgccagtttgttgaatgatttgttgatgatatttatgaattctttgaatgattgggctattttcaataactgtctctgtcatttcttgttggatattaaattttaaatcttggaaattctcataatccagcttatgactaaagcgtgtcatcgttgctggtgatgtaccaatcgcatgggctaaggagttaatcgttgaaaaggcatcgctataaccattttgtcttatataattgacgatgcgtttatcagtttttgtaaataaatgttgataacgttgaacacgattctcaaatttcattgtgtcaccccttcatcttaatgattactattatatatgaaaaatattttcaagatagtaaaaagcattgataaaaattatcttaatgatatattgtaaatgactttacgtgaaaaaacgacttatggagtgaggaataatgttaccacatggattaatagtatcttgtcaggcactaccagatgaaccattacattcatcttttattatgtcgaaaatggcattagctgcgtatgaaggtggtgctgttggtattcgcgcaaatactaaggaagacattttagcaattaaagaaacggttgatttaccagttattggcattgtgaaacgtgactatgatcactcagatgttttcattactgcaacgtcaaaagaagttgatgaactgatagaaagccaatgtgaagtcattgcattggatgcaacgttacagcaacgtccgaaagaaacgttagacgaattagtgacatatattagatcacatgcacctaacgttgaaatcatggctgatatcgcgaccgttgaagaagctaaaaatgcggcacgacttggctttgattatattggcacgacgttacatggttatactagttatacgcaaggacaattactttatcaaaatgacttccaatttctaaaagatgtactacaaagtgttgatgcaaaagttattgcggaaggtaatgtcattacaccggatatgtataaacgcgtgatggacttaggcgttcattgttcggtcgttggtggtgcgataacacgaccaaaagaaattacgaaacgttttgttcaagttatggaagattaaatgataacgataaaaaacgagatgaccatcattaattaaaggtacctaattatcttaggtggctcaatgaatgtaatgggttcatctcgttttgtttgtttatgatagtgattttatttttaatttgaattatccaaaaataagtaaagcgacggggatagtgattaatagcgacaatgccacgcgtaaaaaccaaatgatgatgagtttccagacaggtattttaatttcagttgctagtatacatggcactaatgctgagaaaaagataatggctgatacgcttactacaccgacgacaaatttagtactcattgcagctttagttactaacaaagatggtaaaaacatttctacaatagaaatcgctgaagcttttgcaagtacagcctgatcagcaattgggaaaatataaataaatggatagaatatataaccaagccaatcaataaatggtgtatagttcgctacaatcagtcctaaaaaaccaatcgataatatagaaggcaaaataccaacagtcatttctaaaccgtctttcaaattgtcccaaacgttcttcacgagggatggtgttaatgcattttgtctcatcgcctctgcatatgcagttttcagtctgcttccttcaatagcaacttcttgttctccttcttgtccgttataatattctgttgattcattgatgattggcggtagccatgcagtaattgcagtcacgacaaatgtgatgactaaagttatccaaaagtataaattccaatgtggcattaatcctaaagttttagcaacgataatcataaaagttgctgaaactgttgaaaagccagtcgcaataatcgtggcttctcgtttgttgtacatcccttgcttatagacacgattagtaatcaataatcctaaggaataactgccgacaaacgaagccactgcatcgacagcggatttacctggtgttttaaaaataggtctcataattggctccatataaacaccgacaaattctaataagccatagcctactaataaagaaagcgcaattgcacctactggaattaagatacttaatggcatcattaatttttcaaacaaaaacggaccatagttagctttaaatagtattgatggaccgattttaaatacatacattataccgattattgcacctgcaactttaaataatgtaatgaccaagtttgtgattgaagtcataaaagtacgtctcactattggtaacgctgtaccaattaaaatcataatcagtgcaacatagggcataagtggacctatgattgagcgaatggctagatgaacatgatcgacgaaaatagtgttgttaccattaatcgtaaaaggaataaagaaacatagtatgcccactaaactatagacaaaaaaacgccatgcacttggttgttgtgcattagaatgatattgattcattaaagcaacccctttgtttaaatgaatacacaaaactgtatgatgcatcttccccttaatgagatgaatcattattttaatttagaaaaatctgaaaacttactataattgtatagtttgaattattttcagaccaatacaaattaactaattatatatagattgaaactatattacttaataaaatgtttatcttaaatgttgttgtgttgattcaacgccacaattaaagtatttataaattatttgagggtacagatatttgtaaatgattagtatcgatttaatatcgtattattaaatttttattaattttgtagtcttaatcaaaaaataatatatgtcatgttatattgaaggtgcagttgtttttcattctcaagagggggtcaaaaaaatacttttgaggtgattatatgttaagaggacaagaagaaagaaagtatagtattagaaagtattcaataggcgtggtgtcagtgttagcagctacaatgtttgttgtgtcatcacatgaagcacaagcctcggaaaaaacaccaacgtctaatgcagcggcacaaaaagaaacactaaatcaatcgggagaacaagggaatgcgataacgtcacatcaaatgcagtcaggaaagcaattagacgatatgcataaaaagaatgataaaagtggaacagtgacagaaggtaaagatacgcttcaatcatcgaagcatcaatcaacacaaaatagtaaaacaatcagaacgcaaaatgatgatcaagtaaagcaagattctgaacgacaaggttctaaacagtcacaccaaaataatgcgactaacaaaactgaacgccaaaatgatcaggttctaaatacccatcatgctgaacgtaatggatcacaatcgacaacgtcacaatcgaatgatgttgataaatcacaaccatccattccggcacaaaaggtaataacaaatcatgataaagcagcaacaacttcaacaacacccccatctaatgataaaactgcacctaaatcaacaaaagcacaagatgcatccacggataaacatccaaatcaacaagacacccatcaacccgcgcatcaaatcatagatgcaaagcaagatgataatgttcatcaaagtgagcaaaaaccacaagttggcgatttaagtaaacatatcgatggtcaaaattccccagagaaaccgacagataaaaatactgataataaacaactaatcaaagatgcgcttcaagcgcctaaaacacgttcgactacaaatgcagcagcagatgctaaaaagattcgaccacttaaagcgaatcaagtacaaccacttaacaaatatcctgttgtttttgtacatggatttttaggattagtaggcgataatgcacctgctttatatccaaattattggggtggaaataaatttaaagttatcgaagaattgagaaagcaaggatataatgtacatcaagcaagtgtaagtgcatttggtagcaactatgatcgtgctgtagaactttattattacatcaaaggtggtcgcgtagattatggcgcagcacatgcagctaaatacggacatgagcgctatggtaagacatataaaggaatcatgcctaattgggaacctggtaaaaaggtacatcttgtagggcatagtatgggtggtcaaacaattcgtttaatggaagagtttttaagaaatggtaacaaagaagaaattgcctatcatcaagcgcatggtggagaaatatcaccattattcactggtggtcataacaatatggttgcatcaatcacaacattagcaacaccacataatggttcacaagcagctgataagtttggaaatacagaagctgttagaaaaatcatgttcgctttaaatcgatttatgggtaacaagtattcgaatatcgatttaggattaacacaatgggggtttaaacaattaccaaatgagagttacattgactatataaaacgcgttagtaaaagcaaaatttggacatcagacgacaatgctgcctatgatttaacgttagatggctctgcaaaattgaacaacatgacgagtatgaatcctaatattacgtatacgacttatacaggtgtgtcttcacatactggtccattaggttatgaaaatcctgatttaggtacatttttcttaatggatacaacgagtagaattattggtcatgatgcaagagaagaatggcgtaaaaatgatggtgtcgtaccagtgatttcgtcattacatccgtccaatcaaccatttgttaatgttacgaataatgaacctgccacacgaagaggtatctggcaagttaaattcatcttcggaatttaatatgctatgtaaatcgtgctgttatcatggtgcagcagacgtaagtagcatcacagtgttgaattttaaaatagtaaagtgaaataaagcgcctgtctcattagcgaaaactaaagggacaggcgtatctgtttatgagtttaataaattgtatgaataatatggttgattgaataactgtttatcatgatgataaattgggtttttaaaaataatggtatattacgccgttgttatagcgtttaagaaatcaacaactttacgataaatagtgattgcttcgtcattaggtctacgatcaaaatcatgctcgcttttattcacgcgttcaaatgttgaatgtggaacatggttcatgatatgttcgctttcctcaacagggacatcataatcgccattacaatgcgcaatgaaaacaggtggaagtgctttaagttcatttggtgagatgttgtattttgaatcagtataatcagcaatgttaatcatattgatccactcacctgtaccacgtgcataaccgtagattaaaaaacgttgggcgatttgatcttgaataatcggtgttggtgaagtaagttgagcaagtactgtttcattcacactttgagctgttttagcgtaatagctatttgccattttaaacggttcagtgttgatgccactataaccataaaaatcaataacaccatcaatatctctgtctcgtgcaattaatagacttaaatatgcacctgatgatctgccaaaggtaaaaatagggcaattagaatattgtgattgaatcgcatcgaatgatgtgaagatgtcatcgatgatgcaatcaaggcttacttctggtaataaacgataacttagttgaattaaatcgtaatgttccgtaaggatatcgatatactgtggcgataaatcattggcctttccaaacattaaaccgccaccatgaatgtagacaatggcaccttttgttggttgatgcttcgctttaataattgtgtagggtaattcaaatgcatctttagtaattactttatctttaatttcagtcacgactatacagactccttatttttgaaattgatgtcattataacattgtcttaaatttctatgaaaaattatcttttgatggtgtgtcatgataattctgttctaattgacgtaaagcgtcacgggtatgtttctttagaccttccccataatccatcattttaacaatatctttaaaagcggcacgcggaatggctaaattttctaaatcttccatagaaaattcaagattgatatcatgtggtcgctgttcagcaagtttatgcacaaagtcaggttctgtgacaaaaggcgaagacatgccaaccatatctgcatgttgtaaagcatctaaagcagactctggagaattaatcccgccacttgcaattaaagggatgcgacctgctaaatgttcatagacaatttggttaactggccgaccgaaatgttcacctggtgtacgcgacgtattttgataaatatgtcgaccccagctagcgattgctaaatattggatgtttgaaacgtccatgacccaatcgattaattgattgaactcgtcaatggtatatcctaaatcactacctctggtttcttctggcgttgctcgaaatcctaaaataaaattgtcaggtgcttctttatcaatcacttcttgtaccgcacgcataacttctaaacataatcttgcacgattttttaatgagtcggcaccgtaatggtctgtacgtttattcgaaaaagttgagaaaaatgtttgaatcagcaaacgttgtgcaatcgaaatttccacaccatcaaaacctgctttaatcgcgcgtaatgtagcatcgcgatactgctgaatgatgctattgattttctcatgagacatggcgataacatcgtgttcaatcggtgaatgcaacgtcatagggcttggtccatacacctttccaaaatgtaaaattgcttgatttgaaaaacgaccagcatgcgctagctgaataatagcgaggttaccatgttgtttcatcgtagatgccatgttagttaatccagggatacaagcatcatgatcaatattaaagccatattcaaacaattgcccataaggttcaatgtaagcagcgccggtgacttgcattccagctgaattagagcgacgtgcagcataagccaagtctgcttttgtaatatagccttcttttgttgatgcgtttacggtcattggtgataatacaaagcgattcgaaattttgatgccattaggtaagtggattgattgtaaaagtggtttgtatcggtacatactatgattccttttctattcaatattgttttcaaagtaccatggaaagaatgaataatcaatgatgaacagtcttgatagaatagaattggtacatggaaagcatttttaaaattaaaattgaactaatgaatgtcatttgtaggtctgaaaatatgaatatgaaaaagaaaaatacaagcgaaaagatataaaagttaattgaaaaacgttatcatatacgtgggtatatgaagagggaatggtattaagaacgctaaaatgttatgtcggtttgacatgacaggataagtttggagatgacgaattggttaaattaagcgtattagactatgccttaatagatgaaggtaaggatgcacaaaaggcattgcaagattcagtgacacttgcaaaattagcagatcgacttggctttaagcgaatttggtttacggaacatcataatgtaccagcgtttgcgtgtagtagtccagaactgatgatgatgcatgttttgtcacagacatcacaaattcgtgttggttctggtggtgtgatgttgccgcactatcgaccttataaaattgctgagcattttagaatgatggcagcgttatatccaaatcgtattgatttaggtattggcaataatccgggtactactatggtaaagcaagctttagatggaatagatcctacatatgatagttatgatgaatcgatttcgttattacgtgattatcttacaataaaggataaaccaagtgcgcatacgttaggtgtccaaccacacattggtcattttccagaaatgtggttattaagtagtagtccatcctctgccaaaatagctgccgaacaaggtatagggctatcagttggaacatttttactgccagatataaatgcgatacatgcagcgaaggataacattgatatttacaaaaaacatttccaagtatcaacgattaaaatggacgcaaaggtgatggcatctgtatttgtcattgtagctgataacgaagcggaagtagcagcattacaacatgccttagatgtttggttattaggtaaattacaatttgcagaatttgaacattttccatcggtagacacagcgcaaaagtataagcttaatgatcgagacaaagagatgattcaagcacatcaagcacgtatcattgcaggtacacaagaacaggttaaagcgcaattagatgatttcattgctacgtttgaagttgatgaggtgttagtagcaccgcttattccaggcattgaacagcgttgtaaaacattaaaattactcgcggaaatctatttgtagcattttaaatagaagagaaaggatgaagataagatgaaaaagttagccaattatttatgggtagaaaaagtaggagatttgtatgtgtttagtatgacacctgaattgcaagatgatattggtacagtaggttatgttgaattcgtgagtccagatgaagttaaagtggatgatgaaattgtgagtattgaagcatcgaaaacggtgattgatgtacagacgcctttgtcaggaacgattgttgagcgtaatacgaaagcggaagatgaaccaaatattttaaattctgaaaagccagaagaaaattggttgttcaagttggatgatgtggataaagaagcgttcaatgcattaccggaggcgtaaatgaagacgttgaagacaaatgaagaacgattagaatatttaatcgattatatgtggcgtgagcgaaatgacaatgatgaattagagatgccaacatcatttgaagcattgtgggaattgtatcgaggtttagctaatgtaagaccagccttacctgttagtgagacatatctagccgttcaagatgcgttgttaagtgatttgaaccgccaacatgttatggatgtaaatgatttgaagccgataaaaggggacaatatctttgtttggcaaggtgatattaccacattgaagattgatgcgattgtaaacgcggcgaatagtcgctttttagggtgtatgcaagcaaatcatgattgtattgataatatcattcatacaaaagcgggtgtccaagttcgactagattgtgcagatattattcgacagcaaggtcgcaaagaaagtgttggtaacgctaaaatgacgcgcgcatacaatttgcctgcaaagtatattgtgcatacggtaggacctcaaatacgccgattgcctgtttcaaagatgaatcaggacttgttagttaaatgctatttgagttgtcttaaattggctgatcaacaaagtttaaatcatatagcattttgttgtatttcaacaggtgtatttgcttttcctcaagatgaagcagcagaaattgctgttcgaacagtagaaagctatctcaaagaaacaaattcaacattgaaagtcgtgttcaatgtatttacagataaggatttacaactgtataaggaggcatttaaccgtgatgcagagtagtaaatggaatgcaatgtctcttttaatggatgacaagacaaagcaggctgaagtattacgtactgcaattgaggaagcggaggcaatagtgattggaattggtgcaggcatgtctgcatcggacggctttacatatgttggggaacgctttacaaaaaatttccctgactttattgaaaagtatcgtttctttgatatgttgcaagcaagtttgcatccgtacggaagttggcaagaatattgggcatttgagagtcgctttatcaaattaaactatttagatcaacctgtaggtcagtcttacctcgctttaaaagcactaatgaaagataaaaaatatcacatcataactacaaatgcagataatgcttttgaggttgctgattatgatatgactcatgtatttcatatacaaggagagtatattttgcagcaatgtagtcagcattgccacgcgcaaacatatcgtaatgatgacttaattcgtgaaatggtcatggcacaacaagacatgcgtattccttgggatatgattccaagatgtccaaaatgtgatgctccaatggaagttaataaacgtaaagcagaagttggcatggttgaagatgcagattttcaggcacaattgcaacgttataatacatttctagagcaacatcaagatgataaagtattgtatttggaaattggaattggctatacaacaccacagtttgtgaaacatccgtttcagcgtatgacgcgtaaaaatgaaaatgcactttatatgaccatgaataaaaaagcatatcgcattccgaattcaattcaagaacgtaccatacatttgactgatgatatctcaacattgattacagcagcactccggaacgacagcacaacgaaaaataacaacattggagagacggaagatgtacttaatagaaccaattagaaatggagaatatattactgatggtgcgattgcactcgccatgcaagtttatgttaatcagaatatctttttagatgaagatattttattcccttattattgtgatccaaaagtggaaattggacgttttcaaaatactgctatagaagtgaatcaagattatatagataaacacagtattaaagtagttcgccgagatactggtggtggcgctgtgtatgttgataaaggtgccgttaatatgtgttgtattttagaacaagacacttcaatttatggtgattttcaacgattttatcaaccagctataaaggcgttgcatacattaggtgcaacagatgtgatacaaagcggtagaaatgatttaacattgaatggtaaaaaagtgtcaggcgccgcaatgacattaatgaacaatcgtatttatggcggttattcgctattacttgatgttaattatgaagcaatggataaagtgttaaagcctaatcgcaaaaagattgcatcgaaagggattaaatctgtgcgtgcacgtgttggtcatcttagaggagcactggatgaaaagtatcgggatataacaattgaagcattcaaaaatttaatggtgacacagattttgggaatcaatgacattaaagaggcaaaacgatatgaattaacggatgcagattgggaagcgattgatgaattagctgataaaaagtataaaaattgggattggaattatggcaagtcacctaaatatgaatacaatcgaagtgaaagattatcatcaggtactgtagacataacaatttctgttgaacaaaatcgtatcgcagattgtcgcattcatggcgatttctttggacaaggtgatataaaagatgtggaacaagcattacaaggaacaaaaatgacaagagaagatttaacgcatcagttaaagcaattagacatcgtttattattttggcaatgttacggttgaatcattggttgagatgattttaagttaattttgtttaagttttaatgtcgcaccctcgttaaatttcatttaatataatacaaaacaccgtccaaaaataagtgacatgccttttgatagaaggaaagtacactcaacttgtgatggtgtttttgtttatatattgttattgtgctttttgacgaccttttaataaaatcgctgtagctcctacgatgataataaatagaacagcacccaataatcccatatactttactgcgttaccgaacacgataccgacagctaaaaagtctgtatctgagaatgttgttgcagcaccacctaattcgcctaaaaatggcaagaataataatggtaaaaacgttattaggataccatttagagcggcgccagcaacagcacctttaataccgcctcttgcattaccgaatacagcagccgttgcacctaagaagaagtgtgcaactacgccaggtaaaatgacgacgccaccaaataagaataagataaacataccgatgacacctgtaataaagctgacaaagaatccaattagtactgcattttgtgcataagggaacacaatagggcagtctaatgcaggtttagaatttggtacaagtttttcagagatacctttaaatgctgggacgatttcagctaagattaagcgaacgcccgttaaaataataaatacaccagcagcaaatgtcacgccttgaattaatgaaaatacaataaagttttgaccatcactaatagattcgtgtacataactaacgcccgcaaataagcatgcgatgaagtaaagtaatgccatcgtaatcgagatactaattgtactttctcgtaagaaacttaatccttttggaaatttaatctcttccgttgatttagacttacctttgaataattgacctacagcacctgcggcaaagtaactgattgaaccgaaatgccctaatgctacttgattattgccagtaattttacgcattgtaggttggagtagtgcaggtaagactgccatgattaatcctaatacgagtgcgccgataacaatcgttagccagcctttaatatgactgactgttaaaatgattgctaaaaacgcagccatgtaaaatgtatgatgacctgttaaaaagatatattttaaattagtgaagcgggcaattaaaatattaacaatcatgccacagaccatgatgagtgcagctgttgttccaaaatcttttaaggctagtgagacgatagcttcgttattaggtacgataccttgcacaccgaatgcgtgttggaatattttaccgaatggctcaagagatcgaacgacgacatcagcacctgcacttaaaattaagaagcctaatatcgttttaatggttcctgaagtgattgttgcggcaggttttttctgaacgattaaacctataaaggcaatcagtgcaacaagaatggctggttgacttaaaatatcgactataaaattaaggattgcttgcataggtcgtacctcctttaaatcatgttaagttgttgtaatttttctgcgagcttttgttgtaattcagctttgtctaaaatattatcaagaactaagacgtcccctagacgttcggcattttcagctaaatctctaccacaaataaacaagtcagccatctctggacttgctgtcataatgtcactatgctcaacttctatatcagatggtgcattaagttgcctaagcgcttcttgtgcgttcatttctactataaaactactacctaagctgtggccacatactactaaaattttcatattaatcatgctcctttaaaatagtggtaatttcttgtgcattttttgcatttaataattgttgtactgtttgattatcgcccaatattgttgctaaattttgcaatatagataagtgtgaatgattgtcgatggcacttaatacgaatatgagagatgcgtaatgatcttcatcgcaaaacgccacgtgttgattcaactttaatagacttaatccaacttgatgcacgttattattggggcgtgcatgtgcaattgcaatttcaggtgcgataacgatgtatggtcctaattcatttacactttcaatcattgcttcaacataaccttgttcaataacttgttcttgtaataaaggttgcgaagctacagtaatggcttcatgccaactattgacttgttcttttacaatgatgcgtgttgtggtcaaaatgtctaatgccacgatgttaaacctcctttgtcttagttacagcaatgtgttgcttaattttacaaattttcccatctaagaaatcttgtcgagataactcgttacttaatagttcacttagttgtcctagtgcttttaaatgtgcattgggatgatccgttgccaatgtaatcacaaggtatacgggatcgtttgctttgctaccaaattcaacaccttcagtaaaataagttaatgaaaagccgacaccattgtgtacatattcagttccagcgtgaattagtgaaatgtgtggactaatcaccatatatgacccgaattgttcaaattgatttaaaattgcttctatataattgggaccaacaatatcatcttttattaaaggttgaactgatacagtaactgcttcattaattgatagtgattgtgtgtttacactgatacggtgttcgggtagtaaatcagctaatgacttaccttcagtagccatttttattacacgcttttctctagcatcattaatgagttgatttaatttttggcgtgattgctcattgatgaacgaatcgacgtttataacgggtactactgaaatatcgcacggtacggttgaaatcacatagtcaatgttattttgaattaactgcttttcatctaactgatagatagaataggcgtcccaaatattaaattcgggataaagatgatttaattttgattttaaaagttgagatgtgccaatacctgatccacaaagtaagacaactttaatcattaattgtttatttgttgcgccacgttccatacttgatgcaaagtgaattgcaataaatgttaattcatcttcattgaaactaatagctgtatctttttctatcgtactaatatgtttactgattgcatcaacaacttgaggatagcgtttatacacttcttgttttaatggattagcttgtatcatatcgtatttaattcgatgtatagctggctttatatgtgtaagcaaactggtatgcagtttatggtcatttgacatatcaattcctaattcttggctaacacaagtgatgaattcttggatgttttctgataaaacatgttgttcatttatattggtagatatagtgcaatcagtcatttttgaaccaagtaaatgtaacgtgataaagataatttcagactctggaaatgtgacactacaactgcgttctaagttttctatcatttttgaagcaatagcatactgattagtatgtcgccatttatcaatttcattgataggtatatcgaacgaaaaattttcatttagacgctgaatggcaatgagtatatgatagattaagccatcgatagccgactgaactaaatgataattttcactatttaatgtcttaataatggcacggcgaactaatgcgattgattctgaattaaagatatcagcctctataaaaggtgcagcttgtttcatatattgatgtataaagtgtgcatacgctttacgataatgatcttcctcaccaataatattgaatcctttattgtggacataatttaactttaaatggtattgatctagttgggcctgtatcatcttaatgtcatcagcaatggtgcgacgagaaacattgacatcgtgggcaagctgttttgttgaaacaggatcagttgtttcgaataactttaaagcgatatgtgtgagtcgctcatcttttgaaaaatgaatttgattcgttagattgtgctctaattcatttaatatcgttgtgttagctgttgttactttgatgcctgcagctttattacggctgacattgtaatgataagtttcagcatattgctcaatatatgctatatcatattgaatggtacgaggtgatacaccaagttgattagcaatggtatttattggaataaacgtttgctcatgaattaaaagatacaaaatttcgatttgtctataacttaacaacgtaatatcctcctatttgtaattgtaagcgatttcataaaaacgtagatatgcaatctctttcatattttaatccgaaaaattgcatatcaaaatgtttatggtgcaagattttatagaaacttttaaaataaattagatattcatgttgacaatttaaaaatgtcgcagtatatttagttagacatctaacgaaatggtggtgcaataaatggaattcacttattcgtatttatttagaatgattagtcatgagatgaaacaaaaggctgatcaaaagttagagcaatttgatattacaaatgagcaaggtcatacgttaggttatctttatgcacatcaacaagatgggctgacacaaaatgatattgctaaagcattacaacgaacaggtccaactgtcagtaatttattaaggaaccttgaacgtaaaaagctgatctatcgctatgtcgatgcacaggatacgagaagaaagaatataggactgactacctctgggattaaacttgtagaagcattcacttcgatatttgatgaaatggagcaaacactcgtatcacagttatctgaagaagaaaacgaacaaatgaaagcaaacttaacgaaaatgttatctagtttacaataaatggtaagcgtgactggtagaaatcagtcactttatctttaatgttatagttagatatctaattattagtaagctaattattgaaaaagacaaggagtattgaacaatgaaagacgaacaattatattattttgagaaatcgccagtatttaaagcgatgatgcatttctcattgccaatgatgatagggactttattaagcgttatttatggcatattaaatatttactttataggatttttagaagatagccacatgatttctgctatctcactaacactgccagtatttgctatcttaatggggttgggtaatttatttggcgttggtgcaggaacttatatttcacgtttattaggtgcgaaagactatagtaagagtaaatttgtaagtagtttctctatttatggtggtattgcactaggacttatcgtgattttagttgctttaccattcagtgatcaaatcgcagcaattttaggagcgagaggtgaaacgttagctttaacaagtaattatttgaaagtaatgtttttaagtgcaccttttgtaattttgttcttcatattagaacaatttgcacgtgcaattggggcaccaatgatttctatgattggtatgttagctagtgtaggcttaaatattattttagatccaattttaatttttggttttgatttaaacgttgttggtgcagctttgggtactgcaatcagtaatgttgctgctgctctgttctttatcgtttattttatgaaaaatagtgacgttgtgtcagttaatattaaacttgcgaaacctaataaagaaatgctttctgaaatctttaaaataggtattcctgcatttttaatgagtatcttaatgggattcacaggattagttttaaatttatttttagcacattatggaaacttcgcgattgcaagttatggtatctcatttagacttgtgcaatttccagaacttattatcatgggattatgtgaaggtgttgtaccactaattgcatataactttatggcaaataaaggccgtatgaaagacgttatcaaagcagttatcatgtctatcggtgttatctttattgtatgtatgattgctgtatttacaattggacatcatatggtcggactatttactactgatcaagccattgttgagatggcgacatttattttgaaagtaacaatgacatcattattattaaatggtataggtttcttgtttactggtatgcttcaagcaactggtcaaggtcgcggtgctacaattatggccattttacaaggtgcgattatcattcctgtattatttattatgaatgctttgtttggactcacaggtgtcatttggtcattattaattgctgagtcactttgtgctttggcagcaatgttaatcgtctatttattacgtgatcgtttgacagttgatacatctgaattaatagaaggttaaatatttcgtacacttctggctgagtatatttcggtcggaagtgtatttttcgaaaaaaataaatatatgatacgattatgaaaaaataaagtgagaatggcatatgtataaatctaaaatattgttgaaatatatttttagtgaagaatcagaagttaaagatttaactgaagaaaaatataatcaagattacgaagcattaacatttagctttaaagaggaaacatatcaaagtaggttagctaagaaaacaccgactaaaacaggatattttgttacatgttggacaaaagacgagaacaattgtaatcaaccatactcaaaagaggcatttgcagattacttaatgattatagttattgatgaagaattaagcggttatttcttatttcctaggaattattggtagaaaaaggcatcttaactacatttgagcataaaggtaaaatggcttttagagtgtatcctaagtggtgtaatcaattgaataaaacagcagggcaaacacaaaagtggcaatgtaaatatttttttgaatactaataaaaagtcatatggttgaacttataagagatgaatatatcatctttcgataagataaccatatgactttattttttattatttaatgatgaacggtttcttgtcctactttattccaagtgaggataaagctcaacattgcaaacacactgattgctgttaataaaataaaaccgacatcccatccgaatttatcaactacagcacctaagacgatgttggccattacagcaccaaacagataaccaaataatcctgttaatccagctgctgtgccagctgcttttttaggaacataatctaatgcttgtaaaccaattaacataactggtccatatattaagaaaccaatggcaattaatgagacattgtctaaccaagcattgcctggaggatttaaccaataaattaatacaaatactgtgacacctaacataaagaagaaacctgcaggtccacggcgacctttgaataatttatcagaaatgtaaccacataataatgtaccaggaattccagcccattcgtataagaagtatgcccaacctgatgcttttaagtcgaaatgtttttcttcacttaagtagaccggcgcccaatcaagtacaccataacgcacgaaataaacaaatatatttgcaaaggcaattgcccatacccatttattgttcagtacatatttaaataaaatttcttttgtagttaattctgtttctaatgttttcttatcgcttgtagcaaagtcatttttataaatttcgattggaggtaaaccttgagattgaggtgtgtctctaatcaatacgtatgaaattgcggcaatgataagtgctaagagtgcagggtaaatgaatacaccttcgaaaccttttaaataaccaaagttgataaatgctgttgttgtaataccccaagcagcaataggagccataatacctccaccaacattatgcgcaacgttccaaagggcagtcttacttccgcgttcacttacactaaaccagtgaacgagaacacggcctgaaggtggccagcccataccttgaaaccatccatttaagaataataggacaaacataataccgatacctgatgtaaagaacggtacaaatcccattaacaaattgacgatagcagtgagtactaatccaagaactaagaatatccgagcattgctccgatcacttacagtacccataaagaacttactaaatccatatgcgatggaaacagcagaaagtgcaaaacctagttccgcttttgtaaaaccttgctcttgcaatgccggcatcgctaatgaaaagtttttacgtaataaatagtacccagcgtaaccgatgaaaataccaagaaatacttggagacgtaatcgtttataggtatcatctatctgattttctggcaaaggcttaatatgctttgcaggtttaagaaaattcataaaatcctccttaatatgtatttatatgcattttgtgcgataaacttatattagacatgtatgaaagcgttgtcaatatacttttatgaaatcttgtagatttagtttttgaagtattttataaaaatttaggaaaaataaatttccacacataaatttataattatgcaattattatgtcgttatacatactagctgtgtatctacgaatgagtgcaaacatatttttatttgcagaaaaggggtaaatggcatataagtatcttttttatgtaagttggtataaaatttatactaataggagggatagtatgaatatagtagggcatcatcacatatccatgtatacaaaagatgcaaaacgtaataaggatttttacacaaatgtccttggattacgattggttgaaaagtcggttaatcaagacaatccttcaatgtatcatttgttttatggggacgaagtaggtacagccggaacaattttaagcttttttgaaattcccaatgcgggtcataagcagccaggtactgaaacgatttatcgattttcattattagtaccaaatcaagcggcacttcattattttgaaaaacgtcttgagaataatggtattaagtctgaacgtttgtactatcttggacgagaaggtgttgtctttaaagatgaagacgacttagaaatcatactgcttgttaatgatagttttgaagtaccacatcaatggcaacataacgcttatagtgaaatacctctagcatatcaaattttaggaatagggccagtagaattaagagttagaaatgcagcgcgtacggtagaatttttggaaaatgtcttaggttatcgcaaaagagataatgaatcattcgatgtgctgacattagcaccacaaggtttatattcggattttgtagttattgagcaacagggacaacgtgaaagacctggacgaggttatatccatcatattgcagttaatacaccacaaatgaatgacttagatgcaatttacaagaaattacagcaacaaccacaaagtaattcaggtataattgatcgctatttctttaaatcattatactatcgccataattcaattatgtatgaatttgcgactgaagcgcctggatttactattgatacacctgttgaacaattaggaagtcaattgaacttgcctgactttttagaagcaaaacgtgaacaaattgaaagtaagttacacgaaatataaaggagaatgtttaatggcaaaattagaaatgaataaaaatacgcctcttgagtttggtttgtattccttaggtgatcatttattgaatccatttaaaggtgaaaaagttagttatgagcaacgtattaatgaaattattgaagcaagtaaattagcagatgaagcaggtattgatgtttttgcagttggtgaaagtcatcaggagcattttacaacacaggcacatacggttgtgttaggtgcaattgcccaagcgacaaagcatattaaagtttcaagttcttcaacgattattagtgcaacagatcctgtaagagtatttgaagacttcgcgacattagatttgatttctcatggtagagccgaaattgtggctggtagagcatcaagaacaggtatttttgatttgtttggctatgatttaaaagactatgatgaattgtttgaagaaaaattaggtttacttttagagttaaataaaactgagcgtattacttggtctggaaaatatcgtccagaacttagaaatatgaaaatattcccaagaccaatcgataatatattgccaatatggcgtgctgttggtggtccacctgcaagtgctatcaaagcgggaaaacaaggtgtgccaatgatgattacaacccttggtggcccagcaatgaactttaaaggttctatagatgcttatcgtcaagcggcaactgaagcaggtttcgatgcttcgcctaagtctttaccagtaagtacagcgagtttgttttatacagctgaaacaactcaggatgctatgagagaattttatccacatttgaatacagggatgtcatttattcgtggcgttggttatccgaaacagcaatttgctaattcaccagattatagagaagcgctaatggttggaagcccgcaacaaattattgaaaagatattgtatcaacacgagttgtatggtcatcaacgttttatggcacagattgattttggcggtgtgccatttgaaaatgttatgaagaatattgagttaattggcaacgacattataccggcgattaaaaagcatttatcaaaataggaggggcgtcatcatgaatattgtattattgtcaggttctacagtaggttctaaaacgagaattgctatggatgatttaaaaaatgaactagaagtcatcaatgagggacaccaaatagaattgatggatttacgagatctcgaattagaatttagcgttggaaagaattatctagatactacaggagatgtatataaattaacgacgtcgttaatgcaggctgatgtgatttttattggttttccaatttttcaagcttccatccctggtgctttgaaaaatgtatttgatttacttccggtcaatgcgtttcgcgataaggtaataggacttgtagcgacagcaggttctagtaaacattatttaattcctgaaatgcatttaaaaccaatattgagttacatgaaagcacatacgatgcaaacgtatgtattcattgaagagagggacttttcaaatcaacaaattgtcaatgatgatgttgtatttcgtttaaaagcgttggcacaatccacaatgcgaactgctaaagtacaacaacaagtgcttgaagaagaaaacaaccaatacgacttttaaagtataaaaataagacgctcggcacactaaatttgtatgtgtttgagcgtctttttatattaactatatagccagtgaacgacgataaaggcaagtgatgacaagcatattgaggtaataatgattgtcataagcggtttaagtgcacgatttttaagatctttaaatgcaacatttaaccctaaagcaaccatggccattaataagcaaatggttgatacagtatttaaaatatttagcaatgctgacgggatagttacatatgtattcactaaggccataatgacaaatccaattaaaaagtatggaatgcttattcgacccttgctagatgattctgatgaacggaaacgcataattaaaataagtacgatggttaatggaatcagtaagaatactctaccaagtttaccaagaagtgcgattttaagtgcatcactaccaccaaagccaccagctaagacaacgtgtgcaatttcatgaagactaacgccagaccaagcgccataaacatttgtcgtcattgaaaagatagcgtagatagctgtatatataagtgaaaatatcgtaccaatcaatgcgatgataccgatactaatagctgtatctttttcacgtgatttgaatattggagctactgcagcaatagcggcagcaccacaaacgcctgtacctacacctagtaataatgcgatgtttttgtcaccatgcaacagtttgttgacaaagagcatcattacaatactgaaaataacgacacctacatcgatggctaatagtctactaccttgaccgataatatcgaatatattgagtttaagtccatataggatgattgcaaatcttaataaatatttagatgaaaacgtaatacctgagctatattgttcaggatatcctctaaagtgacgatatagaatagcgattaatatcgcgatagttaatgcgccaaccttatctaagattggcaatttagctgctaaaaagctaaataatgcgactataaatgttaatgatagtccaatcataaaatgcttatttttcaatgatgccatgagcagtgcctcctttaatagcattttagcactgttttgtcgtatttttaaatataaatttggaatggttaataaattgatatctaatttaagttgtgcgatatggaatagggtgatgtgtaagaagcgctacataataaatcattagtgggtctttatcaattctatttcactcccttagttgatagaaaacaaatttaatatgtaaggtgaaataacaatatgttattatagtgataatttacagaattatatgaaaaatgaatgaggatgtgatggtatgtttggaatgaaagtgaatgaacaaatgacattaaaaattttagaagctcatgacacagaagcgcttttcaatttagtcaatcgttcaagagattcacttagggaatggttaccttgggtagatgcaactgagcaaccatcagatacgcgtgcatttatcaaaagaggacttttgcaatttgctgatggtaatggatttcagtgtggtatttggtatgtgggaacgctagttggtgtcataggtttacatgaaattaatcacatgcacagaaaaacttctttagggtattatttagataaacaatttgagggtcgtgggattatgacacaagcagttgaggcattgataaagtattgcttcgatgagattgacttaaatcgaattgagatcagtgccgcagctaataatgaaaaaaagccaagctattcctgaaagactgggatttactagagaaggtatgttacgtgacaatgaattactaaatggtatttattcatcgagttatatctatagtttattgaaatcagaatacaactccaaataacaaattagacttacaaaagagtgatgacatttaaaatggtatcgctcttttatttattttctaaaaataaaaggttgttgacagtattattttataacaatgtaatgattttgataattattatcaactagataatgttcatgggagtttgccttaaaatcatcattttaagagctacgtattatcttggcatttagggagtgtgagatagtacgaatgagggcatgtctatggggataatagaatttctataatgaggtgtcaaaatgaaaaaattaacaacgctattattagcatcaacgttattaattgctgcatgtgggaacgacgatagtaagaaaaatgattcaaaggcatcgaaaaaagatgacggtattaaagcagagttgaaacaagcaactaaagcatatgataaatatactgatgaacagttgaatgaatttttaaaaggaacagagaaatttgttaaagcaattgaaaataatgatatggctcaagcaaaagcattatatccaaaagtgcgtatgtattatgaacgctctgaaccagttgccgaagcatttggtgacttagatcctaaaattgatgcgcgtctagcagatatgaaagaagagaaaaaagaaaaagaatggtcaggatatcataaaattgaaaaagacttatatgaagataacaaaattgatgatatgactaaaaaagacgcacaacaattattaaaagatgctaaagaattacatgcaaaagcagatactttagatattacaccgaaattaatgttgcaaggttctgtagacttattaaatgaagttgcaacttctaaaattacaggtgaagaagaaatttactcgcatacagatttatatgattttaaagcgaacgttgaaggtgcacaaaaaatttatgatttattcaaaccaattctagagaaaaaagataaaaaattaagtgacgatattcaaacaaacttcgataaagtaaaccaacttttagataaatataaagataagaatggtggttatgaatcatttgaaaaagtatcgaaaaaagatcgtaaagcatttgcagatgccgttaatgcattaggagagccactaagtaagatggctgtgattactgaatgacaaattacgaacaagttaatgacagcacacaattttcaagacgtacatttctaaaaatgttaggtattggtggtgctggtgtggcaattggcgcgagtggtgtgggtagtgtttggtctttcaaatcgatgtttaatacacctgaagacccagaaaaggatgcatatgaattttatggtaaagtgcaaccaggcattaccacacccacgcaaaaaacatgcaatttcgttgcgttagatttgaagtcaaaagatagagatgcaattaaggcaatgtttaaaaagtggacggttatggctgatcgtatgatggatggagatacagttggcaaggccagtaacaatcctttaatgccgccagtagatactggtgaatcgattggattaggggcgagtaagttaacaatcacctttgggattagtaagtctttgatgaagaaaattgggttatctagtaagattcccgatgcctttaaagatttaccgcattttccgaatgatcagttaatagacgattacagcgatggcgatattatgattcaagcatgttcaaatgattcacaagtgtcttttcatgcggttcataatttagttcgtccgtttcgagatattgttaaggtgcgttgggcgcaatctggttttatctctgctaaaggtaaggaaacgccaagaaatttaatggcatttaaagatggaacaattaatcctaggaagaataatcaacttaaagattatgtgtttattgatgatggatgggcgaagcatggaacttattgtgttgtcagacgtatccaaatacacattgaaacgtgggatcgaactgcattagaagaacaagaggcaacatttggtcggaaacgacatagtggtgcgccgttaacaggcgggaaagaatttgatgaaattgacttaaaagcgaaagatagtcatggcgaatatattattgataaagatgcccatacgagactagcgaaagaagctaatacgtcaattttacgtagagcctttaattatgtggatggtacggatgatcgtacaggtaacttcgaaacaggcttgttgttcattgcttttcaaaaagcgacccaacaatttatcgatattcaaaacaatttaggtagtaatgataaattaaacgaatacattacacatagaggttctgcttcatttttagtattaccaggtgttagtaagggaggataccttggtgaaacattatttgactaaaattatagcaatgctaattactgctgctatggtgtgtaactttgggttactgaaaagtcaggcagcagaacaacaaagtattagtgatgtatatagtgtgataacggatgcgaaatctgcactttctaataattcgatatcgaatgacaataagcagaaagcaattgagcaagtggtaagtgcagttaagaaattatcgcttgaagataatagcgaaggtaatgctgtcaaatcaaatgtgagaaagctagaagatgcaaaagcgaatgatgatcaaaaagatacactttcgcaattaacgaagtcattaattgcttatgaagagaaattggctagtaaagatgcgggttctaaaattaaattgttgcaacagcaagtcgatgccaaagatgcagcgatgacaaaagcgattaaagacaaaaataaagcggaattagaatctttgaacaatagtttgaatcagatttggactagtaatgaaacagtgattcgcaattatgacgcaaatcaatatggacaaattgaagtcgcattattacaacttagaattgcaattcataagtcaccattagatacggcaaaagtatcacatgcttggacaacttttaaatcaaatattgatcatgtcgataaaaaaagtgatacgtctgcaaatgatcaataccatgtatcacaattaaatgatgagttagagaaggcgattaaagctatcgacaacaatcaattgtcggatgctgatactgcgcttacacattttatagaaatttggccatatgttgaaggtcaaattcaaactaaagatggtgctttgtatacgaaaattgaagataaaataccatattatcaaagtgtattagacgaacataataaatcgcatgtgaaagatggcttagtagatttaaataaccaaattaaagaggttgttggccatagttatagctttgtcgatgtgatgattatctttttacgtgaaggtctagaagtgttattaattgtaatgacattgactactatgacgcgtaatgtcaaagataataagggtactgcaagtgttattggtggtgcaattgccggacttgtattgagtatcgttttagcaattacattcgtagaaacactaggaaatagcggtatgcttcgtgagagtatggaagcgggattaggtatcgttgcggtcatattaatgtttatcgttggtgtttggatgcataaacgttcgaatgcgaaacgctggaatgatatgattaaaaatatgtatgccaatgcgattagtaatggtaatttggtattgttagcgacgattggtttaatatctgtgttgcgtgaaggtgttgaggttatcattttctatatggggatgataggcgaattagcgaccaaagattttatcataggtattgccttagccatcatgatattaattatctttgcgctattatttagatttatcgtcagattgatacctattttctatatatttagagtattgtcgatttttatttttattatgggattcaaaatgcttggcgtaagtattcaaaagttacaattattaggtgcgatgccaagacatgttatcgaaggattcccaacagtgaactggttgggcttctatccaagttatgaaccattgatagcacaagctgcctatattatggtagttgctttcttaatctttaaatttaaaaaataaaaaacaggccgagtgcctgtttttttgttgcgatgttggaaatattcggtattgcagtataacgataatcacagcattaattcttataagattaatgtgttggcagtttgcctcggcatgtgaacttaacaatgaacatactgaactcaaagagcaatatgagtggcaatgtgagtaatatatttaatgttatgtctggtggtgcaatgatactcgccagcacaaagcaagcaaagtaaatatatttacgataatgtttcaaagaatatgtatctataagaccgaattttgcaagacccataaataatattggtaattgaaatagaatgccaaatgtgaataaccaacgtatgagttcaatcaaatatgctttaaagccaatgacaggcgaaatgtttaaagttaatgataattttaacgcgaattgaatgatcattggaaagccaacataaaatgcaaaagcgacgccagcacagaataataacacactaaaaaaactatacttataaataaattggcgctcattattatgcaaaccaggcgcaataaacgcccacaattgataaaacatgactggtgaaatgaaacaaaacgcgatgaaaaatataatcatcacgtatatttggatcatttctgtgaatgaaaatgcatgtaaggacacatgtgcacgggtaatatacgttatgaatggtgtcatccaccaaaatgatgaaacatatacgacgatgaccgtaatgacgaacgacaataaaatttttactaaccgatggcgtagttcgctaaagtgaaccattaaggtgtggtcagtgctattgctctcgctgttgcttcgattccttactgggtgtatcgtgagactctttatctaaatcttctgttgcagatttaaattcttttaaagtagaaccgatagcacgaccaaattgtggtaattttttcggaccaaaaataattaaagcaataatgctaatgacgacaagacttgttgggcctgtgatgcctaaaataaaagtgttagttatcatgataatcaacctcactcataagtagtatatagtatttactttataccgaacgataatgactatcaacaatattttatataataattaaaatattgctataaatataaattactgaggtattaattctgaaataatagcttgttctttcaagtcgatataagtacaagtaccagcttgaatatcgatatgccatttataaatgccagcttcagccatttcattacaaaatgtttcgaaatctgtttgtccttgttgatgtctagttaatacatcttgaacgatagattgatttgaacttggagcgacaggatgattactttttacagatgaagtaacaatatcatcttctgattgatgtacgtatgttgcagtgccatcttgaatattaacaatattgtacgtcatacccatatccttaaaagctttgaatagttttggaaaatcaacaccagtaaattgttgatgtgcttgttgaatttcagataatgtaaatgccataatagtctcctttgaatgatttgatttagtgaaaatgcgtgcatcatactaaaattagaatgttgttaattatgaagcaaggtgtaacgaaagtaaaaaaatacgacttgtaggcgttgaggtgttagtttcaaaaagtcataactaggtggacaatcatatttttttgtgcagacttgacaaatatagttgtcaaaaagacaaatatcatttacagtgtagttgaggagttgatgcgatgtgcgtaatcgattgaaagaattacgagcacgagatggcttaaaccaaacgcagcttgctaaacaagcgggtgtttcaagacaaaccatttcgctaattgagcgaaacaactttatgccatcggtattaactgcaataaagattgctcgtatcttcaatgaaacggtggaaactatttttattattgaggaggatgaggcatgaaaatactaagatatatcggatatcttttactaggtggacttgtaggtggtatcataggtggaattttaggtaactttgatggattgggtattgagaatttgacgttcgcaacgcgtaataatgtcgttgtaatatcaattattgcgactatgatcatcatattaatagaaatcattgttttgatgaatcaaagacgtgcattgaagtataagcgacttgtagatgaagaggtagataacgaagaaacagatcaatatgaattgcttgcgaatcgtcatgttttaaatggaagtatattaagtattctacagacagttattgccttgttagtgttgcttatttttgtggtaggacaagctgaagcaaatggaatactattctttttaataccattttttgctagtggtattttcaatacacaatttacactgtttaatagaagatttgatgacagaatgccaaaaattgcagataagaattacactgaaaagcgattggaaatattggatgaaggtgaacgccatatagaattaattgcattatttaaaacatatgcgatcaacttatcaatattgatactagccattgtagtaattgggctttattcaattaccactggaattaatcaaagcttcagtttgctacttatcattgctattttcatatataacgcctttagttatttattgaagagtagacgtttttattaaaattaaacaaagaggagcaaggatatgacaacattgttaaacttagattgtgtgaacaaacaatacaagtcttcggattttaaattacaagatgcatctttaacgatttctactaatgagacagttggattaattgggaaaaatggctcaggtaaatcgacattaattaatattctagtaggcaatcgacataaagataacggtagtattgcattttttggggaagaacatgctatggatgatgtcgaatataaagaacacataggtgtagtgtttgatgatttgagagtacctaataaattgactattaaagatattgataaagtatttcaatctatttatatgacttggaatagtcaaaaattctttgatttaatcaaatattttgagttgccactacaaactaagattaaaactttttcaagagggatgcgaatgaagatagctttgacgattgcactttctcatgatgtgaaacttttgattttagatgaagcaactgcgggtatggatgtttctggacgagaagaagtaatggaactattagaagattttgtcgcgcaaggtggaggcatcttaatatcatcgcatatttctgaagatatagaacaattagcggataaattagtgtttatgaaagatggacgaatgattttaactgaacagaaagatatacttttagcacaatatggaattgttacgacagaagataaagatgttgaaattcctaagcatttaattatagcttctagattgtcaaaggggaaatatcaaattttagttaaagattatgcagaaattgaaaatgcagaacctttaaaacacattgatgacgctacgaaaatcataatgcgaggtgaagtataatgaaaggtatgttcctaagtagtttttatgcaacgagaaagcaaacatatatttattttatagtcgctatcatagctgcgggatactttgcagtatttaatccgttgatgagttcggcaatggctggagttatgttaattacacctattactgataatattaaacatgaaaaagactcaagatggatgtattatgtatctactttaccggttaaacgtagtgattatattaagtcatactttgccttttatttaatcttattcggtgcaagtttaatgattggattagttgtgactacaatcgtgacccaaagtgtgatgattggtattatgtcaggtttaatgagttttggtatcataggggcatactctatcattttcccattgacatttaaatttggcgctgaaaactctaatgtcattatgatatttgcatctatcctactgcttttctctttcgtggtctttttctttatatatggtatggttagtggtgcatctgcattagaatttgaaaaaattagcactgaaggatggctagttgtcatagcatatgcggttattggtatagttataacgagcgtttcttatatattgtctattaaaatttttaacaaacaagaactataatcaatactcttggtgtgaagctagtcattgaaataatttttagagcaggtgataaatcaatacgattgtcatctgttctttttgttgtggaatgaaatgtgggggataagtataggtggcatatctagattgatttatttgttttgaggtggttatgttgtgtgagaattgcatccttttagatagtggggattagagaatatatgttatttataagtatcatttgatgattgtataggctaacgatttcctcggaaatatttaaaaacctcgatcatgtagcataactgaagtttgtcaaaaaagtataatgtgaagttcgacacttttggattcagttcaaatactttgaccgaggtaaatactatttattcatgtttattacgtagacgttgatttttaaaataaatcagcatgatgcagaaggttgcaactgatactgagataatcattacatggtcgtgacctttaaataaaaggctgacaatataagacataacgagtatccctagtgaatatgaaatatacttcgcatttgtcaattcgttatggaaataaggcgtgattaaccataatccaatatagaatattaaaacactgatgtacatcatattaatttcaaataagtcatttagtttattactattactaaaaacaattgctgcattaataacgcctaaagcgatattgattaataaatgcgtatacgataaacggaaaccgatagatgacaatttatgattaatgtaattttcagtaatgatccaatatacaccgaaaagactaattaaaatcataaattggaatatataaatgtaactaaaatgatcaatgctaaatgatgacgaagctaaaccaaccagtacctcgccaaagataataattgttagtaacgaaaaacgttctactaaatgcatcatattaacaggtgataatacgagatatttttgaaatggaataagtcctgtcgctgcaatgaatacgcctaaaaatccagggatgtaatggatactttgtggtagtactaatgatagaaatgataaaaatgaaatcacaaaggctacggtcgcaaaagcttgacatgtacgcttatcgccataatctaatcctgtacgtatatgtaataaatactgtaatccgatacttaaatacataattgccacgcataagaagaatgggaagaatgttttttcaaagtctggatataaactattagatagaaagaccatgataaacatattaaacatcataaacgagacgtctttgaatgtaacttgaccaaatcgatttgtaaaaaatgtttgatgagaccacattaaccataagaacaaactcatgacgatgtatttgaaaaataaatcagctgaaatagaaccgttttgtgttgttaaaatcacatgtgcaattttttgaatggcatagacgaaaattaaatcaaagaacaactcatggaatcctgcacgcttttcagctaaatgttttggtgttaatgcattaaccataaaattttaactcctttaagatgtgtaattaatttactaagtatactatttattttttctagtgaataggggcagatttgacgatgaagtggaaggaggggtgacagggagctggttgcggcattaacagttatcagcgatttaatatttgactagagacgtaatggtaagaaaaagttgatgagaaattgatggtgaaatcagctgtgaatagcgatgcaatgatagatagcatttaattagagtcattacgcgaaatgattaatgataatttgtggtaaatcaaagcataattttgtactatagatgaggatgatagagcatatttaaaagtgtgaaatgttaaagtgaaaccgtttacgtttccgattgcccaatcaaattactacattgtataatatgtcttgttaaatgcataacaagaatgaaaatgtaacatacgtagcaattggtttcataaattggatgttagtggcgtattggttcattagacgtattagtaataaaattgtatatatcataaggagatgaatatgacatgacgagagtcgtattagcagcagcatacaggacacctattggcgtttttggaggtgcgtttaaagacgtgccagcctatgatttaggtgcgactttaatagaacatattattaaagagacgggtttgaatccaagtgagattaatgaagtcatcatcggtaacgtactacaagcaggacaaggacaaaatccagcacgaattgctgctatgaaaggtggcttgccagaaacagtacctgcatttacagtgaataaagtatgtggttctgggttaaagtcgattcaattagcatatcaatctattgtgactggtgaaaatgacatcgtgctagctggcggtatggagaatatgtctcaatcaccaatgcttgtcaacaacagtcgctttggttttaaaatgggacatcaatcaatggttgatagcatggtatatgatggtttaacagatgtatttaatcaatatcatatgggtattactgctgaaaatttagtagagcaatatggtatttcaagagaagaacaagatacatttgctgtaaactcacaacaaaaagcagtacgtgcacagcaaaatggtgaatttgatagtgaaatagttccagtatcgattcctcaacgtaaaggtgaaccaatcgttgtcactaaggatgaaggtgtacgtgaaaatgtatcagttgaaaaattaagtcgcttaagaccagctttcaaaaaagacggtacagttacagcaggtaatgcatcaggaatcaatgatggtgctgcgatgatattagtcatgtcagaagacaaagctaaagaattaaatatcgaaccattggcagtgcttgatggctttggaagtcatggtgtagatccttctattatgggtattgcaccagttggtgctgttgaaaaggctttgaaacgtagtaaaaaagaattaagtgatattgatgtatttgaattaaatgaagcatttgcagcacaatcattagctgtagatcgcgaattaaaattacctcctgaaaaggtgaatgttaaaggtggcgctattgcattaggacaccctattggtgcatctggtgctagagttttagtgacattattgcatcaactgaatgatgaagttgaaactggtttaacatcattgtgtattggtggcggtcaagctatcgctgcagttgtatcaaaatataaataataagaaaacaggttatcacaacagtattaattacatgttggcataacctgtttttatttgtttatggatttattgggtaatattagtcatttgatggtttaattgcaaatgctctaacagggaacccaggtgcatcttttggtttagggctgatagcgtaaatgatggcgccacgagttggtaattgaactaaattagttaataactcgacttggtatttatcctgaccaagaatataacgttcgccaactaaatcaccattttttacaacgtccacagatgcatcggtatcgaatgtttcatgaccaacagcttcaacacggcgttcttcaattaagtacttcaaagcatctaatccccaacccggtgcatgttgttgtccgttcgcatctttgttttcaaacgtttcaatattaggccaacgttttgaccaatcggtacgaagtgcaacaaaagtgccagattcaatagtaccatgctctttttcccatgcttctaaatgttcacgtgttacgatgaaatcattgttattcgctacttctgttgaaaagtctaatacaattaacggcaataccaattcttttaaatcaatgtcttctaaataacgtttattctcgacaaagtgaattggtgcatcaatgtgagtaccatattgcgttacaatattccaacgttgcacatagaaaccatgatctttaaccgtgaataaagttgaaacttcgcctttttcaaactcactaaaacgtggtatttccggatcaaatgtatgcgttaaatcaacccaagttgcttgttttaaagtatttaattgttgccataaaggatattgtgtcataaaatcacccgtttttagtttattatatgataaatgctgcgattattcttggcgtttagctttaacagcattcacaagtacagtcaatgcatctttaacttcttcttcttttcgcgttttcaaaccacagtcagggtttacccagaataatgagcgatcgatttgttgtagtgaacgattgattgctgtagtaatttcttcttttgttggaatacgtggactatgaatatcatatacacctagaccaatacctaaatcataattaatatcttcaaagtctttaattaaatcaccatggctacgagatgtttcaattgaaataacatcagcatctaagtcatgaatagcatgaatgatttgaccgaattgagaataacacatatgtgtatggatttgagtttcatcacgaactgaagacgttgcaagtttaaatgataaaacagcatctttaagatattgttcgtgatattcagagcgtaatggtaagccttcacgtaatgcaggttcgtcaacttggataactttgattcctgcagcttcaagtgctaatacttcttcgttgattgctaaagcaatttgatcttgaacaactttacgtggtaaatcaacacgttcaaatgaccagtttagaattgttacaggaccagttaacatacctttaactggtttatctgttaagctttgtgcataaactgtttcatcaacagttaaaggcgctgtccattttacatcaccataaatgattggtggttttacggcacgtgaaccatatgattgcacccaaccgaatttagttactaagaaaccttgtaatttttctccgaagaattcaaccatgtcattacgttcaaattcaccgtgaactaatacatctaagccgatgtcttcttgaattttaatccatcgagcaatttcattttttaagaatgtttcatatgcttcgtctgtaatgcgtttgtttttccaatctgcacggtattttcgaacttctcggctttgtgggaatgatccaatagttgttgttggtaaatccggtaagttcaaacgtttttgttgttgttcaatacgttgcgcgaatggtgattgtcttgaagtacgcacgctttcgaaatcataatctaagtttttgaatgattgattttggaaacgctcataacgtgcttttaatttatcatatttaacactatcgttttgattaaataggcgacgcaatgcatctaattcgtctaatttttcagtagcaaagcttaagccttcgccaacgcttgtatctaatgtttcatcatctaaagatactggaacatgtaataatgaagatgatggttgaatgacaagctcattcgtgtgggctaacaatttatcgattaagacttttttagcttcaatgtcacttgcccatacattacgaccatcgataattccagcgtataatgtttttgatttatcaaaatctcctgcttcaatttgtttaaggttatagccattatcatggacaaagtctaaacctaaaccaccaacaggtaaagaacttaagaatttaagatgtacacgttcaaagtatgtttgaatgactaattttttagcaacaccagctttttcgaaatagtcataagcttcacgtgtaatattttcatagctttcactgtcgtctgtaactaagattggctcatcaacttgaatgtactcagcacctgcatcaattaatgattcaaacacttctttataaagtggtaataacgttttaactttttcttcaaaagtttggtgaccgccttttgataatttaacaaaagtaatcggaccaacaatgacagggtgagcgttaacgtttaaagattgggcatatttaaagcgatctaataatacattgcgactcactttaggctcaacattgtcccattcaggtacgatgtaatgatagttagtgttaaaccattttataagtgcacttgcaacatggtctttattaccgcgagcaatatcaaataataagtcatcatcgatagttctaccttggaaacgttctgggatgatgttgaataataatgacgtatctaaaatatggtcatataaagagaaatcaccaactgggatgctatctaagtgatagtacttttgtaataataaattttctttatgtagatcagttaatgtttgatctaattcttctttagaaatcttctttgcccaataactttcgatggcttttttccattctctttttctacctaatcttgggaatcctaagtttgatgttttaattgttgtcataatattgcctccttgtgagcagtaatagattttgagtatgctgcaagttctaatgaatcttcgacattttgaaacggtgtgataatgtataaaccattaaaatattcatgaacagtatcgattaaatcctttgaaatcttaagacttagttctcgtgttttggctttatcatctttaactgcttcaaactgttgtaaaatttcatctgacatcttgattcctggcacttcattatgcaaaaagagtgcgtttttgtaacttgcgataggcataatgcctatgaaaaatggtttgttcaagtgcttagtggcatggtaaatttcaatgattttctctttgctgtacacgggttgtgttataaaataagacattccgctttctatctttttctctaatcgttttacggcaccatctaatttacgaacattagggttaaaggcgccagcgatgttgaagtgtgtacgtttcttcagcgcatcaccgtcagtgttaataccttgattaaatcttagagcgagttcagttaatcctttagaattaacatcatagacattggttgcacctggtaagtgaccaacttttgaaggatcaccagttatggctaatatttcgttaacgccaatgagcgataatccaagtaaatgggactgcaagccgattaagtttcggtctcgacatgtaatatgtacgagtggttcaatgttgtaatattgtttaattaagcttgcagcagcaatgttgctaattctgacagttgccaatgaattatctgcgagtgttaccgcatctacattagctttatcaagtttagcgatattttcaaaaaatctatccgtgtctaaatgtttcggtgtatccaattcgataataacggttggacgttcttgaaccttagatgttaatgattgtctaactttattttgagatggattgaaaagtgctttctttggtatcggaatcacttttttgtcattaacaggtttaagtgtctgaatagattctttaataaatttgatgtgctcaggcgttgtaccacagcaaccaccaattaaacgaacaccttcgcgaattagattttgagcaacttgaccgaaatattgtgcattgtcactatacttaaattcactattttcaatatctaataagctggcatttggataacaagataagaatgcgtgctctggtaattcaatatgtgtgaaagactcttgcatatggtgcgggccatgatgacaattgagtcccacgatgtttgcgccacattgaacgagttgttttaatccttcattgattgcctgaccattaactaagtaatttgtgtttgaagcggttaattgagcaatgattggaatgtcgtatttctttctcgttcgtgaaatgacatttgttaactcttctaggtcgtaatacgtttcgaaaagtagcgcgtcaacgccttcttcaattaaggtgtctatttgaatttcagtatgataaagaatagtttgtaagctgatatcctcttgtttgatacctctaaacccaccaactgttcctaatatatacgtatctttatttgctgctttttttgcgatgcgaacggcggcttgatgtattgctttaactttatcttcgagatcgaatcgttttaacttttcaaaatttgcaccataagtattggtttgaatgacatcagcaccagcttcaatatatgaacgatggatacgctcaactttatctggatggctaagattatatgcttctggacaggtgtctaacccttcagagtataaaatggttccaatagcgccatcagctactaaaacattatctttcaattgtgtgaggaattgactcattgaatgcctcctttaatgcgtatttgatgtctgcaatgagttcatcaggatcttcgagaccaacacttaatcggaatagaccgaaagtgataccacgttcttgtctcacttcttcaggtagtgcagcgtgagacattgttgctggatgtgaaaggatcgtttcaacaccgcccagactcactgaaacgagtggtaatgtcagtgcatcgacaaattgttgtgctttagactcatcagctaaacgtaagccaataacggcaccgccatttttagcttgttctaaatgagatgcagtaagtcccggataataaacttctgaaatttcaccttgctttattaaaaatgacacgattttttgcgcgttttcaacagattgtttaaatctgattggaaatgttttcaaatgtttagcaagcgtccagctatcttgagcagataacatattgcccgtacattttgtattaaataaagtgcttcactaattgccttattattagtaatgacagcaccagcaattaaatcgctatgtccacttaaaaattttgtagcactatgaatgacaatatcagcgccaagtaataaaggtgattgacctaacggtgtcataaatgtattgtctacagctaccagtagttcatgcttttcggctattttagaaacagctttgatatcagtaattttaaaacagggattcgatggtgtttcgatataaattaattttgtgtttgattgaatggcaccctcgatttgttcgagcttggtagtatctacggttgtaaattcaatattaaaacgattcaaaatttgctcagtgaggcgaaaagtaccgccatatacatcatcgggtaaaatgacatgatcaccagatttgaaagtcaaaagtactgctgaaatagcagcaatacctgatgcaaaagcaaaagcgaattttccctgttctaatcgtgctaacttctcttctaaaagttcacggttagggttgccacttcgtgcataatcatatttaacatcgccaccaagacttgtttgatggaatgttgaagaatcatagagtggtgggttagctgaatgatattccacacctctacgccaatcgaatatcacttctgtctcttttgaaagtgtcatacaatctctccaatctgagctttatctaatgcttggatgatatcgcgttcgatgtcttcataattttcaacgcctagtgataagcggattaaatactcatcaatgccacgtttatctttttcagcatctggcatatcaacatgtgtttgtgtgtaagggaaggtcactaatgtttcagtacctcctaaactttctgcaaaaatacaaatatctaaattttctaataatttagcgacgctataggccttgttaagtcttaaactaagcatgccagtttgcccgctatatagtacttcatcaattgcttgaagtgactgacattttttagcaagttttcttgcgtttgattgcgcacgctcaatgcgtaaatgcaaagttttaagtccacgtaacaacaaataactatctattggtgatagtgttgcgccagtcatgttgtgaaaatcaaacaactgttgcgcgagtgattcatctttgacgattacgacacctgctagtacatcgttatgtccgccaatatattttgtagctgaatgtaagacgatatcagcaccatctgctaaaggcgtcgaaagataaggtgttaaaaaggtattgtcgatgatagataataaacctttatctttacaaagttggtaatatggctttacatcaatagcaatcatttgtggattagatattggttcaatgaataatgctactgttttatcagtgatttctttttcaacttgttcataatctgtaaaatcaacgtacttaaatttgatatcgtattgttgctcgtaaaattcaaataatctaaatgtgccgccgtataaatcgaatgaaactaaaatttcatcatgaggtttaaatagattacatattaattgaatggctgacattccacttgatgtagcgaatgatgcaataccatgctcaagtttggcaaaacaggtttcaaatgttgagcgtgtaggatttttagtacgtgtataatcaaaacctgtcgattgtcctagttttggatgcttgtaggcagtagataaatggattggattcgctatagcaccggttgaatcatcagttaatgtgatttgggctaactgtgtatccttcatattaagaccctcctgtaagaaaaaataaaaagcttccgtccttcgtacccgaatgaatcggttaaaaaggacgaaagcttatgtttcgcggtaccacctttatttgttattccatcgctgaaataaccttattcagtacgcattaaaagtaaatatgcttactgaataattatcacaattaaagtcagtaagtaaggatatagtaatgtgatatcccatacttattaacaaaaaatcgtgcgtaaagaatccagtacgccatttaacatcaatgttaatactgtatcgctataacgggcgaacccgtagacacctcatattggcatcaacactccaaggccattttcaaacacgctttcaaaatcttctctcagctactaaagactctctgtataagcagggtgtgttttactttcctctttattgtgtttacgtttcattaaactgttataagatataaattagcttacagagtaaaaaaagatttgtcaacaattattcagaaaattttgatttaaaagttaatttgtttgtgaaattgtaattggtatcttgaagttgaaaaatgaattattttttaaataaagtgtggttaatggttgtctgactcatttagaatacataaaatatatttaactgctgttatcaaataaaaagtgatgtgagtgaattgtcaaaaagtgaagatcaacgtattactaaaacaaaagatgaacaaattaagcaaatagatatatcggatatcaaaccgaatccgtatcagccccgaaaaactttcgatgaaaatcatttaaatgatttggcagattcaattaagcaatatggtattttgcaaccaattgtgcttagaaaaacagttcaaggttattacattgtagttggtgaaagaaggtttagagcttcgaaaattgctggtctaaaatacgtatcagcgattatcaaagatttaacagatgaagatatgatggaactggcggtcatcgaaaatttacaacgagaagacttaaatgcgattgaagaagctgaaagttatcaacgtttgatgacagatttgaaaattacacaacaagaagtagcgaagcgattgagtaagtcgcgcccgtatatagcgaatatgttgaggttattacatttaccgaaaaagattgctgacatggtaaaagatgggcgactgacaagtgcacatggacgaacgttattggcaattaaagatgaacaacaaatgcttaggttagcgaaacgggttgttaaagaaaagtggagtgttagatatttagaaaaccatgttaatgaattaaaaaatgtttcgtcaaagtcggaaacagacaaagtagatataactaagcctaaatttataaagcaacaagaacgacagttgcgagaacagtatggcgcaaaagtagatatatcgataaaaaaatcagtcggcaaaatctcatttgagtttgaatcgcaagatgactttgtgagaatcattgaacaattaaatcgtaagtatggtaaatagttacacaattttatataatatcactttgtgaatctatagatatatcgatagttatctatattctttgaagatgatgcgacttcagtaggttggaagaatacaataatattaataaaattatttgagactatatagaagggagtaacgcaaattatggatcaagttatgagtattatttcatcgctagtcgaaccattaactaaaattgaaacatatgaaagtattgctactaaattagcgatgataattatatatattatcgttgcattaatcgtaattaaaatactagataaaatgattgcccaaggatttaaaatacaaaacaagagtaaaaagggtaataaaaaacgttcgaaaacattaatctcattggtgcaaaatgttgttaaatatatcgtgtggtttatagttatcactaccattttaagtaaatttggcattagtgttgaaggggtaattgccagtgctggtgtcgtaggcttagcagtaggttttggtgctcaaactatagttaaagacgtaattacaggattctttattatatttgaaagccaatttgatgtaggtgattatgttaagataaataacggtggtacaactgtagcagagggaacagttaaatcaattggactccgttcaacacgtataaatacaatatctggagaacttacaatcttgccaaatagtagcatgggtgaaataacgaattactcaattacgaatggaacagcaattgttaaaattccagtatctgtagatgaaaatattgataatgttgagaagaaattaaacaaattatttacatctctgcgtagtaaatattatttatttgtaagtgatcctgttgtgattggtattgatgcctttgaagatactagagtaatattaagggtttcagcagaaacaataccaggtgaaggtttctctggtgctcgtattattcgtaaagaagtacaaaaaatgtttttacaagaaggtattaagacaccacaaccaataatgacaccttttaatcatagtgaaaacggtgtttagtagtttataatacatggaggtcatatttaatggcgtcaaaatatggaataaatgatatagtagaaatgaaaaaacaacatgcgtgtggaaccaatcgttttaaaattattagaatgggtgctgacattagaattaagtgtgaaaattgtcaacgaagcattatgattccacgtcaaacgtttgataaaaaactaaaaaaaatcatcgtatctcaggatgatacacaaagataggagaatgattcatggctttaacagcaggtatcgttggcttaccaaacgttggtaaatcaacattatttaatgcaattacaaaggcgggtgccttggcagcaaactatccgttcgcaactatagacccaaacgtgggtattgtagaagtgccagatgcaagactacttaaattagaagaaatggttcaacctaaaaaaacattacctactacatttgaatttacagatattgccggaattgttaaaggtgcttctaaaggtgaaggtttaggtaataaattcttatcacatattagagaagtagatgcaatttgtcaggttgttcgtgcttttgacgatgataatgtaacacatgtagctggtcgagttgatccaattgatgacatcgaagttatcaatatggaattagtacttgcagacttagaatcagttgaaaaacgcttacctagaattgaaaaattggcacgtcaaaaagataagactgctgaaatggaagtgcgtattttaacaactattaaagaagctttagaaaatggtaaacccgctcgtagtattgactttaatgacgaagatcaaaaatgggtgaatcaagcgcaattactgacttctaaaaaaatgctttatatcgctaatgttggtgaagacgaaattggtgatgatgataatgataaagtaaaagcgattcgtgaatatgcagcgcaagaagactcagaagtgattgttattagtgcaaaaattgaagaagaaattgctacattagatgatgaagataaagaaatgttcttagaagatttaggtatcgaagaaccaggattagatcgattaattagaacaacttatgaattattaggattatcaacatattttactgctggtgtgcaagaagtacgtgcttggacatttaaacaaggtatgactgcacctcaatgtgctggtatcattcatactgattttgaacgtggatttatccgtgccgaagtaacaagttatgatgactatgtacaatatggcggcgaaagtggcgctaaagaagcgggcagacaacgattagaaggtaaagaatatattatgcaagatggcgatatcgttcatttcagatttaatgtataaacgatagagtcaagttaattaaatagtatatatgtagaagaggcggaatcaattgttcgcctcttttaattatgtgtataatttattaaaagaatggaataattttactcgcgttaataatatcttgagtgctgaaaaattgtttgccttcgccagtataagcaggctctaaaacaagattagcctttgcacaataaagccattcaggatgaatgccactattaagtatctcttggaattcttgaaaatctttagaccaatcaatatttaaattcattccttaccacctcacaaccattatagaacatctgttcgcttttgtgaagtgcatttttaaaaatatcatagaaaatttcaaatgaattaatgtcaaaaatgatatgaagagtagtttgaattattattgtaaaaagtaatggcgcatgatataattctttattgtgagtaatgaaaattattccttgcttatctgttttaagattgataagccgtatagaccacaaggaggtgcaaatataaaatgagaacatatgaagttatgtacatcgtacgcccaaacattgaggaagatgctaaaaaagcgttagttgaacgtttcaacggtatcttagctactgaaggtgcagaagttttagaagcaaaagactggggtaaacgtcgcctagcttatgaaatcaatgatttcaaagatggcttctacaacatcgtacgtgttaaatctgataacaacaaagctactgacgaattccaacgtctagctaaaatcagtgacgatatcattcgttacatggttattcgtgaagacgaagacaagtaataattagagggggcgtttaaatgctaaatagagttgtattagtaggtcgtttaacgaaagatccggaatacagaaccactccctcaggtgtgagtgtagcgacattcactcttgcagtaaatcgtacgttcacgaatgctcaaggggagcgcgaagcagattttattaactgtgttgtttttagaagacaagcagataatgtaaataactatttatctaaaggtagtttagctggtgtagatggtcgcttacaatcccgtaattatgaaaatcaagaaggtcgtcgtgtgtttgttactgaagttgtgtgtgatagtgttcaattccttgaacctaaaaatgcgcaacaaaatggtggccaacgtcaacaaaatgaattccaagattacggtcaaggattcggtggtcaacaatcaggacaaaacaattcgtacaataattcatcaaacacgaaacaatctgataatccatttgcaaatgcaaacggaccgattgatatcagtgatgatgacttaccattctaataaaaattaacgaaattaaagcgaaaaaattatcaaaggaggcacacaatcatggcaggtggaccaagaagaggcggacgtcgtcgtaaaaaagtatgctatttcacagcaaatggtattacacatatcgactacaaagacactgaattattaaaacgttttatctcagaacgcggtaaaattttaccacgtcgtgtaactggtacttcagctaaatatcaacgtatgttgactacagctatcaaacgttctcgtcatatggcattattaccatatgttaaagaagaacaataatatttaatatattataacccccgtaggcataggcttatggggttgtttttgtgttttgggataaaagatgaagaaccaaaaaagaggatgtgaatgttttgtgttcggaatttgcacaaagatatgtttatattgcaaaaataatatgaatttagatgcataaaaaaagaggcaaccgtcagtaacagttaacctcaagtgcattccgcagatatgcaccgctatttatgtataatattaatctgtttttagataaaaatcaaggttattgataaagttctttaaacttcttaatttaggtcttgctcgaacgcctataattttatcataagtcgactcgcttatctttgatcgtaaaaaatcaaggttttgttcgaattgccttataattctttggagttctgctttagaataagagagaccagaacaaattagaattaataaaatgagataatcaattattctgtcgaaatctaaattgtgtatatccatttttactgctaaatattcttttaatctattacttgtctctccagttttaaatctacagtcataaagtacaccattgtgagctatagcatttcttaagcctttcatacaatcaatgatgtcacctagtatatctttactttgatcaaatgctggggagtataattttagttgtttttgagcttctatatttaaattttgggacatgcaacgagtgaaaaacaccagatttcctaaagtgaataattcaaatacggcatatagtggcacggttctatcttgatgtatgtaatgataaatgtaaggttttgaattacaatgttcatggatcatgtcgtaaatatctcttcttagtctagtagtatttttttaatgttttttatattttgaactaccgggactataacttttataatatgttaatgatttttgaaataaactatctaaatcaaagccagagtttacacaaactatttctagcaatctatttttatggtatgtcaacaattttttagacagttttcatgtgtagatttttaaatgccactggcgtcaaatactgtaatgaagaatgtggtctaaaattgttgtaccaatttacataatcaaataattctgtttctaactgttctaagttttcaaattgcatttgttttacaaattcggttttcattgctttcatcgttgcttccgcaactgcgttatcataaggacaacctttggtacttaatgaacgtttgattttaaatgtttctaggacttcatctatcaaatgattatcaaattctttgcctctatcagtgtggaatagtttgatttgttcaagattatgatttattctgctgattgcttttgatactaaatttgcgtccttatttttacctgcactgtaaccaacaatttctctattaaatagatctataaataaacatatgtaatgccatgttcctgcgacttttacatatgtcaaatcacttactaatgtctccattggttgttctctattaaaagcgcgattcaaatgatttttaattcgttttttattagtttcttttggatgatttttgtatttagctttcgtataaacagaaactagattatgttttttcatgatacgacctatctttcgtcttgatacagtaagacccttatcatttaaattatttttaattcgtcttgtaccaaagacttttctattagaattaaaaatatttatgacagcacgttctacgtttgaatcatctttagtgattttattatcttttctttttatagaatcataataggtacttcttggtatttttaggactttacacattgctgatactgaatattgatgtgcattcttttgaatgacttctattttcgtcccatgatcagcgctgcttgctttaaaatatcgttctccatttttaaatgttgaacttctttacgtaatttaatcagctctttttcttcatctgataagttatcttggtgattgaatgtacccgtgttttgatgttgctttatccattttcctaacgccgaaggtgttaaatcatactcgcgtataatttcattcctaggcttaccattttcatataatctaaccatttgtaacttaaactctgaactaaatgatcttctttctcttgtcataataaaatcgcctactttcttaaattaacaatatctattctcatagaatttgtccaattaagtgtagacgattcattaatagccgtttcacagaacataacgtgtttatagaaaaggtttttaatttctgtatcaaaactgtataaagcgtgtagttcgctgaatttttcaaaattaagttcttcctctttgtttaaaaagaaattataccctttgaatccatgaaaatagccgatgtttcgtaactggtttttttccgtgctaccatttatttggatacctttattgtctcttatatgtctcattaaaccatcagtagttttaggtgtttttctgttcatagtttttaactccccaatcgttcaaatttattcagcatatctttcgccatctgattagtaacatgtgtgtatatctctagatttttttataatctgaatgacctacatgctcttgcattgcttttaagttaattcctaattgagcaagtgtagatatatgcgaatgatgtaatgtatgcgtcgttgcaggtttcttaatagaactaatctcagttgtctctttgatagcccccctttaataatgttatttattttgtttaaatcgataggaccaccagctgcatttgtgaatatgtaccctatattaataaacttatcattcaaagcataagtgttcttagtaagtcgatgctatggatagtgagccctatggccctatagctattacttctttcagttgtctcttttactccggatgcttccatttttaatcagttatccaattaattgcactatcgatatctagcggtttatctttatagtttatatttcctctctttattgcaaatagctcaccgatacgcatgccattagcaatttgaaactgcaccatagcttttaccattttataattacgttttctcgttggatatttttatacttaattacatagtcgaaacaatccagtatttctttcactgcattatcttttaaatagttattacatatagttagtaacgcatcactatagggatatctattttatctattacacatataactttgaattgcttactattttaaattaacaaattttattctcttagatttagtccaattatgtgtagacgatttatagttattaaattcagggtggtagcaaattaaagttaatcaagagttaagatgaatttaatccatgaacacgtctattatttttataattgtagcaaataaaactttacatcaaggaggtaattaaatatgttcaaaaatatgactcaaaaaattcaatagtattaaaatctattctatcgctaggtatcatctatgggggaacatttggaatatatccaaaagcagacgcgtcaacacaaaattcctcaagtgtacaagataaacaattccaaaaagttgaagaagtaccaaataattcagaaaaaactttggttaaaaaactgtacgatagatacagcaaaaatacaataaacggaaaatctaataaatctaggaattgggtttattcagagaggcctttaaatgaaaaccaagttcgtatacatttagaaggaacatacagagttgctgatagagtatatacacctaagagaaatattactcttaataaagaagttgtcactttaaaagaattgaatcatatcataagatttgctcatatttcttatggcttgtatatgggagaacatttgtctaaaggtgacatcgtcataaatacaaaagatggtggtaaatatacattagagtcgcacaaagagttacaaaagaatagggaaaatgtaaaaatcaatacagctgatgtgaaaaatgtaactttcgaacttgtgaaaagtgttaatgacattgaacaagtctgaaattaagttaaattcgtatatacagtgttttatcgctaatactttgaaagttaggtatccaaagatgcctaactttctttgttatgaccatcatcatatagaaaattctttaatgatgttaatgtcgaaatttgcaaaaataatttctcttttatggttaatcaatatgtttttacattcgacaaccttaaaattaacttctttcaattccataaaaaagtctctataaaataacttagtttaaaaacgattcgtatctttcagattcaaataccatcattttctcctaagacttacattttaattacaattatgtaagttgttttcagaggcatcctattttatattttgtcagaggtgatcttttgaaaacgattttaaaaacaataacatatctcgcacttactatcattggcgcttatgctgctttattcattttaaaaacaatagactctcatggtataacagatcaatttaacccattagtaaaggaagatgattcttatgttaaaacgacagaggtgtctactagaatggatgatcaactccgaagttatagtcaaagtgcttttaataaagaagggaaagagacgcaattaatgtatactgctacatttgatgttaaaccgcatagatacttaaaaattacacataagggtcatcatgtagaaacttttgaagaagttgaaaaggaagaagtaccaaagaaagcattagacaaactgagtcgataatagcatccttatattacatggttcattttaaagatgagtacgaaatgaagtgacacatgacgattaatttaaaaatatttgtaataattatgaatagaattaaaaacaaggggtaatacaatctatatagcatataagcttttgttatgagtttcaaaaaaaggaagagagagtgatattatgaaattaaaatcattagcagtgttatcaatgtcagcggtggtgcttactgcatgtggcaatgatactccaaaagatgaaacaaaatcaacagagtcaaatactaatcaagacactaatacaacaaaagatgttattgcattaaaagatgttaaaacaagcccagaagatgctgtgaaaaaagctgaagaaacttacaaaggccaaaagttgaaaggaatttcatttgaaaattctaatggtgaatgggcttataaagtgacacaacaaaaatctggtgaagagtcagaagtacttgttgctgataaaaataaaaaagtgattaacaaaaagactgaaaaagaagatacagtgaatgaaaatgataactttaaatatagcgatgctatagattacaaaaaagccattaaagaaggacaaaaagaatttgatggtgatattaaagaatggtcacttgaaaaagatgatggcaaacttgtttacaatatcgatttgaaaaaaggtaataaaaaacaagaagttactgttgatgctaaaaacggtaaagtattaaagagtgagcaagatcactaaaatatgttgtaatactaatgataataacatgtcttaattcatattaattattaaaataccctcacaacgcaatgtaatatatcccgtatggatttgaaaggatatatgcctaacgtgttgtgagggtttaattgcatctatttatccattcgaatatcgacttcttctaaatgtttctgatattctttaaccttactttctaaaaacatttcatatggtgcatcaaagaagtcagctaaatgcatggcatctttaaatttaggttcatggtgatgattctcccattcccaaatttgatgtgcttcatatttagtaccatatttctcatttaattgttgtgctaattcgtcaatttctaaattatgtttagttcgtaagttatataaaatatgcatattcattgttcattaacctcgcttcttgatttaaaattcaaagatgctaataatatgtgtatattctagtcctataacataaaataatcaagctatgaattcggcagaaaaaataatgtatatgatattgtcggtacagagactttaaataacgatagctacattgaataaaattgatattcaattactactttgaaaaatatttagataaaaataatttgaatttgttttagaaagtctaataacgggtactacttagaataacgcaaaataaatagaaaaaggagactgaaaattatgtttggatttattggaatgttaattgtcggtggcttaattggatgggctgctggtgctattatgggtaaagatatcccaggtggtattttaggtaatattatcgcaggtattattggatcatggttaggtggaacattattaggacattggggtcctgaactaggaagcatttacatcttaccagctttaattggttcaattatcttaattgcactggtaactttaattttaagagctatgcgtaaataataaaaaattcaattggaaattgaattaatataaagatggcattcagttgtcatcttttttatttgcgtgaaaatggtcaatatgtattataatatttgaaaatgtaggtaagataggattaaaaagtaataaattaacatgagaagaggttggaaataaaaaaacgagtatttgacaaataaaaaaaggatgacgttgggttgcgccatccaggagtattatgttcatgaatataaaagactgtgtagtcatttaagaactacacccatatagtaacacatcacttgattaaagacaatactatttttagagtcattaatttaaaatatgaattaattatttttttagaatagaatattgagattgatatcgaattagtagtcaaagtgttatggtagatatgaaatacataaggtaaggagtaatattatgacgatttatttagttagacatggcgaatcaaaatcgaattatgataataaacattttagatcttatttttgtggacaattagatgtgccgttaacggatactggcacaaaaagtgcagacgatttatgtgattattttaaagagaaacagattaaacatgtatatgtttcagacttattaagaacacagcaaacgtttgaacatatttttccatatgacattgcatcaacgactacgcctctattaagagaacgttcacttggcgtatttgagggtgaatataaagatgaaatcagtgcgaatccgaaatatgaaaaatatttcaatgacccaaactttaaagactttcgtcatagtttttcacaaaaagcgcctgaaggagaaagttatgaagatgtatatcaacgcgtagaacattttatgaatcatgttgtcaatgaagatacacaaaaagatgatattgtcattgttgcacatcaagttgtcattcgttgtttaatggtttattttaataacgtttcacgggaagaagctgtggatttaaaagttgaaaattgcaaaccatatatcattgaatagaagtatagaggttctgaaaagctgtgttttatagcggccttcagaacctttttttgtatttggaatttaatgggaatcattcttatcaaaagacttaccaccaatagctaatgtgataattgcgcttgcgaacaaaataattgaagttataaatgacgctaatgtaaaaggtgtaaattgtgtgagcgataatatcaatgataaaaagaaccaagagatagcccctagaaattgtaaaatagcagaagaaattctaaaactcatataatcatatatagctaaaacaagtgaaggtaatgcgactaataccattataatgatgttgagggtgaataaatatggctgttcaaaagttactgtgtttggtcctgttggatgcattgctgctaagaacaagcaaacaatcgtcgataaaattgctaaaataataaaagtgattcgaactttcatcatgaccatcctttgtttatagagtcaatataagtatggaatatgttagggatatagtcaaatgcgtcaactaatgtggattttaggatggatagagaatttaagatcaataaaagacaggctgggacataaatcaatgttctatgctctacgaagttatattggcagtagttgactgaacgaaaatgcgcttgtaacaagcttttttcaattaaagtcaggggccccaacacagagaatttcgaaatgaaattctacaggcaatgcgagttggggtgtgggccccaacacagaagctgacgtaaagtcagcttacaataatgtaggccccaacacagaggatttcgaaaagaaattctacagacaatgcaagttggggtgggacgacgaaataaattttgcgaaaatatcatttctgtcccactcccaaaatggtatggtattggttaaaatgtattgtctcaaagattagtcacttttaaagataaagaattgtcatgaattaaagcgcatgtactgatgtgttacatgtcgcaatgatggctttcagttatttatcgataacatcactcttgatacctttagattttaagaaatctttaattttatcttgttgctttttattaacatcaccggcatattttgttggcacgtcgacaacattgattttattttgcggttgatagctaagcttttcaatatcttcatcaacattggcgattgtactatttaaagctttgaagtaattcatcattaattcaacgggtttcttatattctttaggaatattgttttcagtgacaaatttcttgaaatgcaaatcatttttaacagctaagttagataagtgactaagtgtttctgcttgtttttcagtcacttttgtttgactgtcaatttgtttatctagtttatgttgcattatatatttgttatcaagtatatcgctatttacagacaaatacttttctatagcttgcttcatctctgcatcactaatatcactatttttcttatctgagttaaagatatcttttgtttctaattttttagcgcttttaggtgcatggatgccagtacttgtgtgatgatcttcgttatcagattgatcggacgcgcaacctgtaagaattaatgtcgatgctaaaaatgtacttagtagtaatctctttttcataatgtaatataactccttggtttatctttaattgaaaaaatgtgtattcatgtttaatagagtaacattgaattagtttggaatgtcacgatgaccttgcaatgaccatagacgtaaatgattacgtgcatgagttgctttttctatcaataatgcatcattttggacgttgttaaggatagcattatctataaataactgcataattggttgaatcaatttagacgtaggtatcgtacgtaaaagcataatgatttcattcacatacttttccttctcaatatcattttttatattgatttgtttgcgagaggtacatactttaagcattatcgcacacctcgttgtatatattaagtttatcataacatgattttatgtcgggataaaaaaataacagcatcttaacaaatgtaagatactgtcagtgaaatgaatgaaactttagtttctgataatatagtcaaaggcatttaatgctgcatttgcaccagcgcccattgaaataataatttgtttgttcttctgatctgttacatcgccagcagcaaatattccaggtacgttagtattattgttacgatcaataacaatttcaccacgttcgtttaattcaacagcatcttttaaccatgatgtatttggaagtaaaccaatttgaacaaagataccatctaagttaagtagatgttcttcgccggtgctcatgtcttcgtaacgtatacctgtaacatggtcttctccgacaacttcagtagttttggcatttgttttgatatcaacatttgataaagaacgtaaacgatcttgtaacacgttgtctgcttttaattcgctagcgaattcgaataatgtaacatgattaacgataccagcaaggtcaatagctgcttcaaccccagagttaccgccaccgataactgctacgtctttattttcaaatagaggtccgtcacagtgcgggcagaatgcaacacctttattaatcaattgctcttcacctggaatgtttagcttacgccaacctgcaccagtagcgataatgactgttttactttctaagacagcaccgttttctaacgtaactttaattgcttcgtcagtcttttcgatatctgtagcacgaatacctgtcattgcatcaatgtcatattgatcaatgtgcgctgctaagttagaagaaaattcagaaccagttgtttctttaacagtaatgaagttctcaataccagcagtatcattaacttggccaccgatacgatcagcaactataccagtacgtaaacctttacgtgctgtgtaaatcgctgcactaccactagcaggaccaccaccaacgattaagacatcataaggttctttattttcaaactcagatgcatctgccgtactgcctagtttcgaaagaatatcttggatcgtcatacgaccattgccaaattcttcgccatttaaaaagacagcagggactgccatgatgttttcagattcttcacggaacactgcaccatcaatcatagaatgcgtgatgttagggttgatcacactcattaagttaagtgcttgaacgacatcaggacatttttgacacgttaaactaatgaatgtttcaaaatggaatgaaccttctaagtttttaatttggtcaatgattgactgtttttctttaggtgcacgaccactaacctgtaaaattgctaaaacaagtgagttaaactcgtgacctaatggaatacctgcaaatgttacacctgtttcttcgccaggacgattgactgagaaacttggtgtacgttttaaagacttttcagaaagtgaaagtctaggtgacatatcagaaatttctgttaataattctttgagttccttagatttatcatctgaaccaaggctggcaacgaattcaacgttgccctccattagttctaatagttgtttaagttgttgttttaaatcagcattaagcatggttgtaatgcctccttagattttacctactaaatctaaaccaggttgtaatgttttagcgccttcttcccatttagctgggcatacttcgccagggtttttacgaacatattgagctgctttgattttgtgagctaatgtactagcgtcacggccaattccgtcagcgttaatttcagatgcttgtacaacaccgtctgggtcgataatgaatgtaccacgttgagctaaaccagtagcttcatctaatacatcaaaattacgagtgattgtttgtgatgggtcaccaatcatagtgtaagtgattttgctaattgcatctgaatggtcatgccatgctttgtgtacgaagtgagtatcagttgatactgagaatacatttacgcctaatttttgtaattcttcatattggttttgtaagtcttctaattcagttggacaaacgaatgagaagtcagcaggatagaagcatactacgctccaagaaccttttaaatcttcttgtgtaacttctttaaattgatctttttttggatcgaaagcttgcgctgtaaatggtaagatttctttgttaattaatgacataaatatcttcctcctaagaatttaagtatgaattagaactatcaattgattgcgcttaattataataattctaatctcttagttagcattattacattttgatccagaatagtcaactggataactttgtaaagtgaatgattacttttaaaataaagaaagataatataaagtgctttgataatggattttgtagtcgatgatttaaaaggttgtgtctatatttaatatcttgattttaatgtaaaaaatgtaaaaaaagaagatttgtattctcaactaagtcaaccttattgataatggtgtgagaatatttgttcgagatggatgaaggtaatgcgtgagaaactggatttttcaagtgtgaggcaatatttttaaaagttcgattattaacttataagcaaataattgctataaaaaagtttggacgtgtacaattgcaatatgaatatttttaattaactgtaaagtatcgaggagtgggtaacgtgtcagatcatgtatataatattgtgaaaaagcatcattctgttagaaaatttaagaataaacctttaagtgaagacgttgttaaaaaattagtagaagctggacaaagcgcttcgacgtcgagcttcctacaagcatattcaattattggtatcgatgatgagaagattaaagaaaatttacgagaagtttctggacaaccttatgttgtagaaaatggctatttattcgtttttgttattgattattatcgtcatcatttagttgatcaacatgctgaaactgatatggaaaatgcatatggttcaacggaaggtttgctagtaggtgcaatcgatgcagcattagttgccgaaaatattgcggtaactgctgaagatatggggtatggcattgtctttttaggatcattaagaaatgatgttgaacgcgttcgagaaattttagacttacctgactatgtcttcccggtatttggtatggcagtaggggaacccgcagatgacgaaaatggtgcagccaagccacgcttaccatttgaccatgtcttccatcacaataagtatcgtgctgataaggaaacacagtatgcacaaatggcagattacgaccagacaatcagcgagtactatgatcaacgtacaaacgggaatcgcaaagaaacatggtcgcagcaaattgagatgttcctaggaaacaaagcaagattagatatgttagaacaattgcaaaaatcaggattaatacagcgatagcaagataccaaaataacccgccccctctagcttaaaatgataagtatagctagagggggcgggtatttcttgcaatgaattagtgtgaagttaatgcagcactatcatttgattcgaaagtatctttgtcccaatgtttagttaacttggcggtacctgtaccagctagcattgaatcgttcacgtttaatgctgttctacccatgtcaatcaatggttcaacggagatgagcacgccggctaaagcgactggcaagtttaacgttgacaacaccaatatggatgcaaatgtagccccgccaccgacgccagcaacgccgaatgaactaataatcacgacagcgattaacgttacaataaattgtaaatcaatttctacattagcgacgggtgcgaccataattgcaagcatggcaggataaatacctgcacaaccattttgtccaatcgacaatccaaatgtcgcagcgaaattggcaataccttctggcacgcctagacgtcttgtttgtgtttgtacattcagtggtaaggcacccgcgcttgagcgtgatgtgaatgcaaagattaatacttccaaagtctttttaacatagcgaattgggctaatacctaacagacttaaaataattaagtgaatgatatacatcgtaattaacgcagcgtacgatgcgattaagaattttcctaaagtccaaatggcgccaaagtcacttgtcgataacgtgttggccataattgctaatacaccgtatggcgttaaacgtaagacgaacgtcacaatcgccattactagtgaatagatagcgtcaatcgcacgctttagcaattcaccatgatcaggttgtttgcgtgctacgcgtaaataagcaaatcctataaacgaagcaaatatcacgacagcaatcgtggaagttgcacgttgtccagtgaaatctaagaatggatttttaggcaataattccaaaatttgttgtggtaacgtatgtgctgttaaatctttcgcttgtttagcaatttcgcttccgcgtgcttgttcagcgttaccaagattaattgttgatgcgtctaaaccaaacaccaaggcatacacaacaccgacaattgcagcaatggtgacagtgccaattaaaaagacaaaaatgagactaccaattttagcaaacttttctccgatttgaattttagtgaatgcagcgacaatagaaatgaaaattaaaggcatcacaatcatttgcaacaatgcaacgtaaccttgtccgacaatgttgaaccagtcacttgttgatgtaataatattcgaatgtgtaccataaataagatgtaataatacgccgaatattataccaatccctaaagctgtaaacacacgtttcgcaaaagatatatgtttgcgagccatcatgtgcaatattacgatgaaaatcaccaatacaataatattaatcagtgtaagaaaagcattcatgaacgtcactcctcaaatttttaaatataattccgactagtatgataagaataatattaattttataatatttcaagagggtatttgcaattaaatgtaaacatgatgaaattcgaccgttggcataagagaatttgtaaacaaatcgttttgaattaagtagagaaaggtgaaaagggttaatagcgtgatgagctagtcgattaaagttaatatttgaaaatgaagcaaggtattaaatgcaataaattaaataagttgtcattacagcgttaataatagaaatgattttaacggaaaaaagtgatgaatatttggaaaagatatatatcgtgcactgtcatgagagataagatatgagaaaacaaatgtatccttgaatcgagatgtggctatggcggtttgataaaaattgctaacctcatatttattgaataaaaagataataaatgatcaaccttgaaaagacgcttcgaacaaacacgttgtaaaaaaatctgtcgaatcaaaatcagcatcttttgagggttcgtgtgtgcaggtggtagttcaaaagctaccgtaaacaaatatttttgtttgagcaaaaaggcgtttgtagtaaatgtgaatatgagtgtgcccttgtgcgattcgtcagttactaacacagccaaacatttaaattgaatgggctcataagatgaatctgtttaggaatacacagaagccatcccatttaaaagtaacatactacaaaaatttattcaaaattcaatattaatcataatgaataattaaaaaacctgaaacaaattagtttgatatgctctcttcaaagtagacattgaaaggagtatatcagcttgtttcaggttttatgattgagtattaaatttgaaaataaattacagttctataggtttataaaaaatcagtttttaaatcatagctatacattactgagtcttaaacttgtgttcaaatcataagtttacaggttgaataaacgtgcgaagaaaccttttttctcttcttgaggtttaggttctgccatttcagactgtgaagctgtgctatcattttctgctttcgcttccgatgaatcgttcgaagtagcttgtttagaagcttctgcatgggcttctgctacttgttgtacagcatcatgttgcgcttctgcatctactgtagcttctttatttgaagtctcaactgctttgtcatttttagactgctcaacgctggctttttcaattgcttcagttgcagaaatttgatcctctttatctactttagtagcattgccatcgcctgcattttctgctttagtatccgtcttggcgtctgttgatgtattcactccagcaaccttcgaatctttgctgtcagctttatcttcagtaacagcattactttcaactttatttgttgattcagccaatactttagcttgagatgcttgtgcttcttggatagcctcttgtgatgtttggattgcttttaatgattcactatttgaatcgattttagttgtaagttgattttgaagttcttttaattcttgttgttgctgatgtacttgattcatcatttgaccaagtaggtgacgttcttcgcgcattttctggatttctagacgtaaatcttctactagttgagcgacattttgattagtaggtaagtttttgtcatcgtttttgacaatgacttgcaggaagtctttttctttttctaactcatcaaacgctagatcataactatttgtttgttttactttgtcggcaatgtctttgaaaagctcgatatcttcttctttgaaatcagttgcttcacgaccacgatattcagtcttgcttagttggtaaccacgttcttctaaatgttgaacaattttacggacttgcttctcacttagttctacgcgttgtgcaaattctttagttaacatactttaaagtcctttctgcatatactttatgtatactgacgtttgtctacgggcagtgaaacgtcagtcttgcttcatacatagtttaaacgttattgttagtgatttcaagtttgtttaaaatggtttacgtaaatccatttcttctaataaatcataaataatttcacgtgcgataccatttgcaaatacatacttcaaaatataatttgatttaacacttgtaccgtagatatcctttgtcagtttaatatttttctttaaaaataagtccacttttttagtgtgaccatcattagttggatgaatgtaatcaatttcagtttgtctttcaaattgatgttcgtataaaaactgtctacggtgttcaataatgagcccattatcttgtgttaaatctgcaggttctttagggacttccatcattaaaaagttaatacttctagaatgaacaaggtttgataataagtttaattcatgttcaatttgatgtaatgtttgtgtcattaactcatcatggttgggtaggtcttttgcaaataaataaattaaaaatgcagaattggttgtggcttcataatgtgcagttgctagactgacaacaacatcgttttctaagcctacgataaagacataatcgttttcagttttgttgttttctaatgagcgtttgatgatacgtttatcttcagttaaagataaatttaacttagtatcgtaaagtttaagtgcttcgttgtaatgtggatctttgacagattgaatggttttaaattccataagaacacctccccaatttaaataatattatagcataatcgcctgttgtaaaagactgttcataaacttttaaatggtataaaaaactgtactatcttaaattagacagtacagtaatctcattttgaattcagtgtgataactaagctttgggacctttagatgcttcagcaaaatgtgtaatatcaacttcttcataagctgaattattttctagtacttcttggtgagatgaatgatcgcgaacgccaacaactaacattttatcgtctaaaataagttgtttatatttttctaattcatcaggcgctaagttgtagcgtgataaaactgcatgttcaccatcttctcctgttaacagtttagtcattttatcactaaatgttccacttgttgagataagggagatttcagagtcgtgtaagtcatttaggtgtaatttacttttactaataattgttagctctgattctaaataaccttcagatttcttttgattgattacgttgtataattcgccagtgtcatttactacagtaatatctgccatagttgtcgcccctttaaaaatttgtttattcaatcttttacccttcttattataaagtaaaacccttacattattaagttataagtcttcattcgcattaaacgtctctgtacatttataaaactattaaaagtttacctaagcagttattgaaaaaatgccaaaaatttgctattatcgttaaataatttacataaactcatataatctaaagaatatggctttagaagtttctaccatgttgccttgaacgacatgactatgagtaacaacacaatactaggagtagcttcagccactaaattgtaaccatgatgggtgatttatatcattttatatgatggtcacagtttatttgatgaaacttcttttacattgattgcatgaccaatacgtgatgcatgttcgttcactcataaaccctgaaactattatttagtttggggatttttttgtatctagcaccaatttaagagcaaaatgtttcacacaaatctgaggaggttttaagagtggagttactaggacaaaaagtaaaggaagtcggcgttgtcattgatgagaagattttaaaagtcgatggatttttaaatcatcaaattgatgcaaagttaatgaatgaagttggtcgcactttttacgagcaatttaaagataaagggattactaaaatcttaaccattgaagcttccggtatcgcacctgcaatcatggctgcactacattttgatgtgccatgtttatttgcgaaaaaagcaaaacctagcactttgacggatggttattatgaaacatctattcattcatttactaaaaataaaacaagtacggtcattgtttcaaaagaatttttatcagaagaagatactgtactcatcatcgatgactttttagcaaatggtgatgcttcattagggttatacgatatcgcacagcaagcgaatgctaagactgctggtattggtattgttgttgaaaaaagtttccaaaatgggcatcaacgtttagaaaaagcaggtttaacagtttcttctctctgcaaggttgcttcactagaaggaaataaagtgacattggtgggagaagaataatgaaaaatttaatcctaagtgttcaacatcttttagctatgtacgcaggtgccatcttagttccaatcattgttggtacaagtttgaagtttacgcctgaacaaatcgcttacttagttacagtagatatatttatgtgtggagttgccacatttttacaagccaataaagtaacaggaacaggattaccaatcgttcttggatgtacattcacggctgttgcgcccatgattttaattggtcaaacgaaaggaatagatgtactttacggttcgctatttttatcagggatattagttattatcatcgcgcctttcttttcacatcttgtaaaattcttcccaccagtagtaacgggtagtgttgttactatcattggtatcaatttaatgccagtagcaatgaattacttagctggaggtcaaggtgcaaaggactatggagatgttaagaacattttgttaggtttaatgacattaatcattattcttgttttacaaagatttacaactggatttattaagagtattgccatattaattggactcgttttaggaacgataggcgctggcttacttgggatggtcgatattaatcaagtcaatcatgccggttggttaggcatcccagtgccgtttagattctcaggatttagctttgatgtgacatcgacgttagtgttctttattgtagctatcgttagtttaattgagtcgacaggtgtctatcatgcgttaagtgaaattaccggtaagaagttagaaagaaaagattttcgtaaaggttatactgcggaaggtctagcgatagtgttaggttctatattcaattcatttccgtatacagcctattcgcaaaatgtaggactcgtttctttatccggtgctaagaaaaataatgttatatacggcatggttgtgttattacttatttgtggttgtatacctaaacttggtgcattagcgaatatcattccgctacctgtgttaggtggtgccatgatagctatgtttggcatggtaatggcatatggtgttagtatattaggacatatcgattttaaaaatcaaaataatttattaattatcgctgtatcagtaggattaggtactggtataagcgctgtaccacaagcatttaaaggtttaggtgaacaatttgcatggttgactcaaaacggaattgttttaggcgcaatctctgcaattattcttaatttcttttttaatggaataaagtataaacaaacggaagaaaatgtgaaataatataactaattaatttgaaaaatggaggctgtttttaatgtgggaaagtaaatttgcaaaagaatcattaacgtttgatgatgtgttattaattccagcacaatctgatattttaccgaaagacgttgatttaagcgtacaattatcagacaaagttaaattgaatattccagttatttctgctggtatggatacagtaactgaatctaaaatggcgattgctatggctcgtcaaggtggtttaggtgttattcataaaaatatgggcgttgaagaacaagcggacgaagttcaaaaagtaaaacgctctgaaaatggtgtcatttcaaacccatttttcttaacaccagaagaaagtgtttatgaagctgaagcattaatgggtaaataccgtatttcaggtgtaccaattgttgataataaagaagatcgcaacttagtaggtattttaacaaaccgcgacttacgttttattgaagacttctcaattaaaattgtagatgtaatgacgcaagaaaatttaattacagctccagtgaatacaacacttgaagaagcagaaaaaattctccaaaaacataagattgaaaagttaccattagttaaagatggacgtctagaaggtcttattactattaaagatattgaaaaagttatcgaattccctaatgcagcaaaagatgaacatggtcgtctacttgtagctgcagcaatcggtatttcaaaagacactgatattcgtgctcaaaaattagtcgaagcaggtgtggatgtcttagttatcgatacagcacatggtcactctaaaggtgtaatcgatcaagtgaaacatattaagaagacttacccagaaatcacattagtagctggtaacgttgcaactgcagaagcaacaaaagatttgtttgaagcgggtgcagacattgttaaagtcggtattggcccaggttcaatttgtacaacacgtgttgtagcaggtgttggtgtaccacaaattacagcaatttatgattgtgcaactgaagcacgtaaacatggtaaagctatcattgctgatggtggtattaaattctcaggagatatcattaaagcattagctgctggtggacatgcggttatgttaggtagcttattagctggtactgaagaaagtccaggtgctacagaaattttccaaggtagacaatacaaagtatatcgcggtatgggttctttaggtgcgatggaaaaaggttcaaacgaccgttacttccaagaagacaaagcgcctaagaaatttgttcctgaaggtatcgaaggacgtacggcttataaaggtgcgttacaagatacaatttaccaattaatgggcggtgtgcgtgctggtatgggttatactggttcacacgatttaagagaattacgtgaagaagctcaattcacacgtatgggtccagctggtttagcagaaagccacccacataatattcaaattacgaaagaatcaccgaactactcattctaattaagataaaggagaacgacaaatatggaaatggcaaaagaacaagagttaatccttgtcttagactttggtagccaatacaaccaattaattacacgccgaattcgtgaaatgggcatttatagtgaattacatgatcatgaaatttcaattgaagaaattaagaaaatgaatccaaaaggtatcattttatcaggtggtccaaactcagtttatgaagaaggttcatttacaattgatcctgaaatatataatttaggaattccagtacttggtatttgttatggcatgcaattaactactaaattattaggtggtaaagttgagcgtgctaatgaacgtgaatacggtaaagcaatcattaatgcgaagtcagatgagttattcgctggcttaccagcagaacaaacagtttggatgagtcattctgataaagttattgaaattccagaaggcttcgaagttatcgctgatagcccaagcacagactatgcagcaattgaagataagaaacgtcgcatttatggtgtgcaattccatccagaagtacgtcatacagaatatggtaatgacttattaaacaacttcgtacgtcgtgtttgtgagtgtaaaggacaatggacgatggaaaactttatcgaaatcgaaattgaaaagattcgtcaacgcgtaggcgaccgtcgtgtattatgtgcgatgagtggtggcgtagattcatctgttgttgctgtactattgcataaagcaattggggatcaactaacatgtatctttgtagaccatggcttacttcgtaaaggtgaaggcgacatggttatggagcaattcggtgaaggtttcaacatgaatattattcgtgttaatgcgaaagatcgttttatgaataaattaaaaggtgtttctgatcctgaacaaaaacgtaaaatcattggtaatgaatttgtatacgtatttgatgatgaagcatcaaaacttaaaggcgtagacttccttgcgcaaggaacactttatacagacgtcatcgaatcaggtacaaaaacagcacaaacaatcaaatcacaccacaatgttggtggattaccagaagacatggaattcgaattaatcgaaccaatcaatacattgtttaaagatgaagtacgtaaattaggtattgagttaggtattccagaacatttagtgtggagacaaccattcccaggacctggtcttggtatccgtgtacttggagaaattactgaagataaactagaaatcgttagagaatcagacgcaattttacgccaagtgattagagaagaaggtcttgaaagagaaatttggcaatacttcacagtgttaccaaacattcaatcagtaggtgttatgggagactatcgtacgtatgatcacacagtaggtatccgtgcagtaacatctatcgacggcatgacaagtgactttgcacgcatcgattgggaagtcttacaaaagatttcaagtcgtatcgtaaacgaagtagaccacgttaaccgcgtagtctatgacattacatcaaaaccaccaagcacaattgagtgggaataattatatatagcaaatgataggctggagtcaccgatattacgcggtttccagccttttttggtgtgcttacgaatgcggcagtcggtgatgaaacagatacgaaagaagttgtagtaaagcgtggagaatataaagagaacccacaaagtggcaaagtacagttagtctataatgaacatgttgaactgatagaggtaccaattaagccaagtgatcgtttaaaagctcgtgatatgttggggaaataccataagttatttatagataagcatgatattaacgggaatgtgcctatattcattaacattggtgaatgggacggcgatgatgaggaattagataaggcagtgaaagatgtatctaacgctaatcctaatcatactgtgattgtggatgatattccgttagaggattaagtgttaaaagttaggtatatagatagaatgaaacaaatcaaaaataaaagaagctacggtttgtagcttctttgttacttttcaaaaatttgtatacatttacgtaaaaatgactttttattattatcttttaaaggcgaagcatctacatagtacatccctctgtcaatttatttgtttccctttaaataaataatttcagattgctcaacaaggtctataaaatactttcgttttctacgttcccaaacaaagtatcgcaactcaagtatcgttttaccagtctcataatatgtggaagtagtgtaaaccactttgagattattgaagtttcttgttaagtccctgatcaaagtgattataaaaaatcccatacagaaaaatggtagaaaaaatatgaataaaaagatagatgtaataatggtatttaacatagtattcgctcccgttttttagataattatgactgatgggctatataatggtacttttttgcctaagtgttagaatattactcatgactattggaaaacttttatactaatcaatcttaaaaccagccgtcatatgttttacagctttttttacaatcatcgtaagactctgtgagatccattaatttagactgctctgtggctaaattaaaagtaatagcatcactagttttaccttcaaatgcgccttctaacttactactttgatcttttaaaattgattcaatttgatctaagctcgagacgcaattttctatatcttctttttcgtcgctaatcatactttgtatttcatttttcaattcatgctttaaagcaaataaacgtgctttctccattgcgattttggcatctttttcagcttcttttttgatagcatctgtagcatcatgtatactttctccaatttcatttgaagcatcacgtatatctttgaacaagtccattttatcccccctcaaaccaacgatatatttcgctgatttctttgtcacggtcttcaaattttttagttgcatcaataattttttcgctaaattgggacaatctttgtttggtatattttaattctccaattgtatcttcaaataacgcttcatcaaaaaagtcataatggccactttttgataattcttcaacgtagttttctatatctgatggggaaataaattcatgagaaccgcttaacaatttattaacgtattccgattcgatttgttttgcttgttttttagtattttccatatatttttctaatgcttttatcgctttatcgatattgtgtaacttatctttcatctctctagccatttgatcagcttttttaccgtccactttaatttttacacttccaccactgatttcaaaagtttcaattccatgaccggaaataggattgaaaaagagtttcgaaagctcagagtcatcagctaatatttctgttcctaaaattgaagatcccaatgtagcaatacctattttatcatttgggtgtgcataatcagttatagtttgattatacttacttaaatctaagttttctttaacattatcaggtaatatattgtaaccattaggtgctgaaaaagtttttgttttatcaaaattaaatagtaccgtcatcacctgtgcaattgtgcctccaagactatggccagcaccataaacatgtttataattccctttattcaaaactgactgagtccaaagataagcttcgttaaattgatcagcttcttttgcattatttttatcaaccatttctagccatttattattaccaactgtactcgggttaatttcttttaagctagtgtctctgtagatagctgcatttaaaattttatttggattagtttcaattttaatgtcattggtacctaaatatatatcagtactaatatcagcaggttcatatttatctgtcccagcataaacaaaatacacagtttcattgtctacatttcctttactgtcttttggagacaccgccattgcttggaagccattaactttatcgacgcgtgaagcttgaattttaaaattgtgtaaggcgccattagcatcttcaatttttgtttctttatcagaggattttgtattataaacattaccagctagttcgtgatatgtgttatctttagtatgaagattgtccattatttcacctcaaaggattggttatattgaatagaaaaatgattattatatttattagtataatattaatatcgggaggggtctatttaaaaatgaaacatgatcaaaaacaaaaatattatgatgaacaaaaagaaagaataataatttatatgaagtataatgttaaaggttataaagaaataaattttgaggagcaaaaagaaaatcctttagatggatttgttattacaggttatataaataatgacaagactaataccttttcagcgcatatgtggtctaaagacgattatcaatttgaatatctttcaacttatagtggctatatagctaaaaatatgccagaaaaccctaaatcagtgtctgaaataaaaaaagaacaatctaataaagaagataaaaagaaagatgattaattagtgatactttaacagagactcttacgctgagcaatgtcctgtgttgcagtggaggaaataatgctatattaaatagtataattatgatgtactgaatcgcaattaaaatatcagagataagggaaaatactttaaataaatgatgctggggagagatttggcaatgtatgatgagttaaaaaataaaccggaacttagaaaatcaattactcatattacattaagtattacagtactaactacaattgcagttataattagattgtttacaaaaaatcctccagaatcttgggtaagcgcccttaatattgctggaacaatttcgattgtatattatatgggagtattcaattcaaaatttacatacttaaagtggcttgcgatttctaaaaaatttagttataaaatctttctagtatttatagctatcattttttttgctttcccttttgtgctattgtttgtgcacaatttatctgagtatatatttcacactgaaaatgttttagtaaattatattagtaggattttcataataataattatgaactttacattcattttaatgcacgctatgtcatttaccatgattatactattgctaatggcagttttatcaagaagaattatgaaaaaagataaatcaaatatatagtaaactaccttgtattatattatagatataatgtaagtaattatagttgttttcttaaaaagcagtttgatagttataaaatattgttatgtttattataagggcaaaaaaagggcataattttgaaataaagggcaagggtgtgaaattattaatcatataagacgttgaaaaacgccctgtgttgcagtggggaatgaggttgtgtaattatatataaaataaaggataatgtgtcattctgatataaatctgtttatctattaatgatcataagtaataataattaaaaaggggttaaaatagtgaagagaaaaattaaaaatccaataatagtattcattatttttacggctattattccaataattttagctgtaggcatgatttatttacctctagtaattaaagttacaggagatgcgaatgaatggcttggattttgggggagttatcttggtggaatcataggaacactaggtgttcttgttgtggctcatcttcagcacaaagaacaaaaaaatttttaaaacagcaattacaagctgaaaaagcagagaatgatagatttttagaaatggataaattaaggaaagagattgattttgctaatttgtatcttgaaaaatttatatcatattatgatgaatatggaaatttgtatgaaaaagctattaataaactagatagattattatttataaaagatgaaaaacattacttaatagaaaatgacttcattcaagtatctgcaaccgcttatgaactagagaaagattacaatcaattaatgaatacatataacctattaaaaactatgattactaatttagatatcagtatagaaataaaaaaattaagcaaagattatttgaagcccctagaagaatatgaatttgaagaatttaaaagaaaatatagagaaaatctacgtatagatcttaatgaaccagaaatattatttagttatcagctttacttgacagaccattataataaaattgtagaacatgtaaaactattaaatgatcaatacagatctatttgaaagtaaaattaatggggacaacgactaaaaattagaaagctttgaaaagattttacttttgatacagcattcactaaaacattagaagatatatcatcccacacgttgcaggcagtgaatacgtaattgaatacgttaattatgaagtgatgttaattgatgtgaagtatttaggtataaaaacgctgtaatatcaattgttataaaataatataaactaacgaaaaatacttatttcattgagtgggaataattatatatagcccccccttaggtataggcttaagggggggtgaggatttaaaattacaataaggacggtaaagggggtaagtgttctaagtttgcgttttaattcatcaataaggcaattttccgtgtttatttttatataaaatttcatattgtttaggatcttcttgttttaaatcataaattatagtttcgtctactatttttctaattcaagtgtattaagctccagtcatttgttgttattataaatattttttgtactgggttgttatttatatgattaattagcctaggagtatctgtttctattattagagcacattttacaggatagtaaatagcaaagtctccgtgataaattgtgtttctctttcatagaggttaacctctaaggttaaattactcaatttgaagattgtgttttgagttatatttttaggaataattcgattatctactatttgttttaggttgcctattgaacgagtgtgtatcgtcccttttgtgtaatcgaaattatttaaagctcttaaaacatttgttaatttatactcgttaatataaccctttactaaagccatccgtttatcgctacctataaaatctttcagtttttttgttgaattcatttttgttttgcataatattttatcctttccattagttgatcgttttcatttgttcaaatctctatccatttgctcggttacagggctgtgtatttgcagagtaatattatgattggagtaaccaacgcgttccgtattcgttttgagtgacgcagctagctgcgataatagtgacatgtggcttataacacattgtgtaatttattgtgtgttttgcgatgtctatattggttgcagattgttgtatatttcacttaaagggcatttataaaaaaagaggccagatgacgtatcatctgaccttcagctaaaacgctgagaatatgtcattcttcaagagaatgaagccggaatggttaccgggaatttgtaaatcaattatatcagatgtaatattacaattcaattggaaaagaactttatctttaattgcttttcgatttcattcatgtcatcttctgaaattattatcgttccagtaggatcagaatcatttattttgcttatacgtcttttgcttattgttgtaattgctgatatattaacgtatgtatctttccctttgtgcttagaataaacacctatcactctatacagttcattagctttttgatttaagttagacaaaagctttttatcttctgtgctaagtttaatgtcaatatctctatatttttgggctaatgcttgtactttactactgatatcgataatctgtttttttaaatctgttgctgttagatttagcaccgattcgtttaacttcaaataatttttattacctttggaagaaagtggaactattgtaactgtttcttttcctttattgtctttgttatctaatattacacaaaaatgattaccagaaaactcactaccaatattactccctagttttacatataccactgttcccctgctatatgatttataatatctttttttattgcttgtaacatcgctatgtatagcaattgaataaaactctagccaatgaggcatgtatataactttcaagtttttactatcggattttgaataagcttgttttagttttttgtttgacgtatttaatttactatttgcttgattgatatttttagacattaaatagtgttctcctaatcattttattcttctttatatcagcattattagcactgaaattaacatgaatggtacgaaaatagatgttactataaaaccaacaatttttattaggtggaactcatcaattttgtatttagcaaatttcgcaatgacctcctatttattcgctttttatagttcatgtatgtgtaaaaaagcctatattgaacatctaattataagcgaattcctaatgctaaaagcaatctaacttacttaaatattattatgagtttttattgaaattgaataaatttaaactatttcttagtctctccatatcgttagaagttggttctttatataatcagataaattagaatcttcaagtaatgtatctttaaaaagttcagtttctaaatcaactctaatatttgaagttagaaaattttctatttcatatatagattcacaatcaattttgttgctgtcatatatataaacactatatttaattaaatcatttagtacgtttaaaagaatttgatgaacttatacaaaagtttcaagaaatagaaaaaatatcttctgatataagtttggcgaccgaattaaatgacgcacaaaaatggatgaaattaaattaaaatgcgatatacatgtttcagtggtgttgttgtgtatggtgatattaaagtctgtgaaaataatcatggcgaattaatcaaaaagtactgcaattataaaaatatcatatatatgtgattgtattttattacgatgaagtaaatgatttaaagcagatacatgttccatttttaaatgttgaacttctttgcgtaattttattaactctttttcatcactttttaaattatcttgatgattgaaggattcagtattttggtgttgttttatcgaatttgagaaaattgagggttttaaatcatactcgcgtataatttcattcttaagcttaccattttcatataatctaaccacttgtaacttaaactctgaactaaatgttcttctttcttttgtcataataaaattgactactttcttaatttaacaatatctattctcatagaatttgttcaattaagtgtagacgattcactgacacatcatgagtacgtaaggaattttgatcgttcattgttattgctttatgttttaagaaatgtgctattgaagggtttaaagatgtttggaatttcttggtttcttgacttatatagttatgaaagagggcgttgtcctttattaaatttctgagatcagaaatgctataaataaaatgattaagattttttgttttcatgtaatttaagaaatggatttgttttttgtgggttatttttaattctgttcttaaatggtttgaattttgcggttgcaaatatgatagctgtttcttttgacaaagtaatagaacctttttcttctggtaccacgatattcactccttgtacaattcaatttaagtcttataaaataattttactatacaaaataggttgtgtaaatagtttcttattgttaccaaataattctcttaaaagcgttatgcaatgccaaacaacactaatggggtgtaactacttccctgtgaatattttattagcattatttacatacacgttctttaatgtgaatttttaaaattacagtttacatgtaacgttgtgcaatgtattctgtatatagaagtgtaaaaacacaattgggttggtagtcccaatgcagttttaaaactgtcagtaaccttcctcctcgggtcgtccgtcatttctaataaaactagaggagggatagcatggagctatctattttttacaatgggcaattttttgtagcattagtagaatataaaatggtaaataattctaaatttatccaatacacatttgggaatgaacctgatgatttagaggtattagattttattcatcatcaattaatgaaaagtattgatgatgtgcaaactattgtttgtactaaaaatatttcaaggaaagtaaatccgaaaaggctacaaagacaaattgctaaagagcaaaagaaacctaaatactctacccaagcacaaatagctattaagaaagaattagaactaaagaaaaaacaaaaacggaagcgctataaagaaaaacgtgatgcatttcaaaaaagaaaaagagaaattaaaaaggtcaaagccaaagagaagcataaggggcattagcaatacgacaaataaattaaaacaaaatgatttataggtggttgggatgattttaattagttcgtgtttgataggcgataatgtaagatacgatggtggtaatcaattgaatgttagattgaaaaaattaatagacagcggaaaagctattcacgcatgtccagaattacttggtggattattaattcctagagaacctgcagaaattattggtggcgatggttttgatgtgtggaatgacgctgcaaaggttgttactatttcgaacaaagacgtaactgacgattataaacatggagcaatagttacattaaaaattttgaaaaaatatcaatgtgatacagttattttaaaagcaaatagcccatcatgtggatcacaagagatatatgatgggaattttacaggaaataagaaaaagggtgtaggtgtggcaactgctttactcattaatgaaggtataaaagtttatgatgaaaatacgttttttgaccaaaacatgattgaaacgatagtacatgaaaagtaaggattgagaatataagcaatggactaatttattgagttgcgttatttcttataaaaataatttttaaaattgttttaataatagtttgattgtgataatatatcagtatagataatttagttaacagacccatgaaagtagaaaccccaccatatgggaatttcgaaatcatgggttttttgttttaaaggattgatgcaatagataaagtagccattctaatatatggagaatttatcagttcaaaattaaaacagatatgggttttcttcattaaataaactttctataaggaaacagaggcaacgctactgtcgcctctgcttgacataccaggatgaaatactctgagtttatgaacgtccacatccaaaccctccaaaccctccaaaccccagtctgcacctactcctcccccaaacaccaattcttaccaaagcattgatatgagtgccaatactggcaatgtgccttgtttgaaaaagatactaatattgcttgaaaggccaccataaatagcaacgccaatgatatacactaaaatagctgcgcatatttcttttggattactgctgataaacaaaccgtatattagcaaaactccgattaaaccgttatatacgccttggttcttcaaaagtacgttaatatttttgtctttcaatttaccaatgctaatattaaatgtttcacttgttttccttgaagttgttgcgaatgtttcgagatacataatatagaaaaactctaatgctacaaatatgattaaaattgtcgagatgatattcattgtaacgctcctttagtattaaatattttcttgtaaaaatgattgcagtgtctgtggttgatcattgactaattgttggaaatcattggattcttggtctaatagtcctcttgctcctgcgtcgtacattgatgccaataatgcaccaaagcctttaggttcatcgtacatttctgcaaatgtctctaatgaaacgggttcatatttaatttctgtgcctgatgcctcagataaaatagcggcaagttccttcatatcataactgtagcctgataataaataacgtttgccccaagtatctggatttttaataatagcaatgacacctctagcaatatcatttctagtaatataattaatacgaccatcaccagctggataaatcagtttatgcatattcatcaattctggtaaatatggtttaagtggatccatgtacattgccattcttacatacgtataatcaatgccacttgttgccaataaacgtgatgcatatccgaaataagggctcatatggaatggattattatgctgatctgcgtaataacctatgaaaatgatatgagcaacgccactttgctttgcggcatatactaaattttccacttcaggaatacgtttaaatgatggatggataatacttggaataaacacaacggtatccattcctttaaatgcttctaccatgctttcttgattaaaataatctaattgtcgaacaggaacttttccgcgccaatcttctggaactttctcaacatttctaacaccaatgtgaaaatgatctatgtgatttgcaatggcttgatttgtaatatgtgtgcctaaatgacctgtagcacctgttaacataatattcattcacttcatctcctaatctttatatacataacataatacttattcgatgattttcaaaacatttgatttaataaaaaattgtaatctgtatttattgtcgctgtgtatagtaaattcgtatatgttattaatgttggaaataccgtaatgacgcgttttagttgatgtgtgtcaccataatctttgataatttttacatggtactgcgacgatatggtgtcatttttgtgtctgaaagttttacagtttttaaaattaaaatggtataaagtgtgaattgtataaaaatgagtctcgtaggataagaattgattaataacagttagcattttattaattaccttaacaatgattcaagtttagttaaatgaggtttaatttgaaagggaatagcgcctcaatataatgtaggtagattgttcatattacgtaattgaaaaatcaaatttaaatagattggggctaaaaattatgaaatttaaagcgatagcaaaagcaagtttagcattgggaatgttagcaacaggtgtaattacgtcgaatacacaatcagtacaagcgaaaacagaagtaaaacaacaaagtgaggctgatttaaaactttattatagtggaccaagttttgaatataaaaaagtaactggatatggatttattgaaggtaaagatagattcattgattttatatacaatggacaatataataaaatatctttagttggttctgataaagataaatataatgaagaagttaacccagatatagatgtgtttgttgttagagaaggaaacggtagacaagctgataatcattcgattggtggcgtaacaaaaactaatagaggagtgtattacgactatatacacacaccaattcttgaaatcaagaaaggtaaagaagaaccacaaaatagtctgtatcaaatttataaagaagacatttcgctaaaagaacttgattatagattaagagaacgtgcaattaagcaacacggcttgtattcaaatggtcttaaacaaggtcaaattacaattacaatgaaagatggcaaatcacatacaatcgatttaagtcaaaaacttgaaaaagaacgtatgggtgattctatcgacggcagacaaatacaaaaaattctagtagaaatgaaataatactttctaacagcaaagcgctatgttgaatcgtgcttgttatggaaatatatggaagttaagcgacgtactgttgcttagcttctttttttgagggtcaaagttagaaaactcacacaaacagtcgcaccacgcattatcttttacttaactagtttaatcatattttatgaatagttaaaaaagggttaatgtgaatatcagcatacagctcctataatatggttgtatgattcaatttacgtaataaaacaatctaatctaatatattggagcatacaattatgaaaatgaaatcaattgcaaaagtaagtttagtcttgggtattttagctacaggtgtaaatactgtaacggaacaaccggtgcatgccgaaaataaacatgttcaagtaagtcaaaatagtaaaaatttaaaagcgtactatactcaaccgagtgttgaatataaaaatgtgacaggttatatcagtagtattcaacctaaaccaggcactaaatttatgaatatgatagaaggtaatacagttaataatctagctttagttggcaaagataaggaacactatcatacgggtgtacatcgcaaccttgatatattttatgttaatgaggataagagatttgaaggtgcaaagtactcgattggtggtatcacaaaagcaagcgataaagttgtcgaccaagtagcagaagcaagagtcattaaagaagatcacactggtgaatatgcatatgactttttcccatttaaaaaagataaagaagcaatgacattgaaagaggttgattttaaaataagaaaacatcttattgatcattatggtctttatggggaaatgagttcaggaacagttactgtccaaatgaaatactatggcaagtatacaattgaattggataaaaagttacaagaagaccgaatgggcgatatcgtcaaagttatagatattgatagaattgaagtcaaagttaaaaaagcataatacttagattggtcgtcgtaatgaattgaaattgcaatagtgaggttaagtgatgataaaacattacttaacttcttttttatgtcttaaaatcatttcaatgatacgtagtaacaccacataaaccttgaaagtactcattattttttgcttaaatgacttaataatacttcaacaattgttaaacgagggttaatgtgaatagaccaatacgtcttctataatgaagttgtatgattctaattacgtaaagaacaatcgaataattacgattggagcatacaactatgaaaataagaacaattgtgaaagcgagtttagcgttagggcttgtaacaacaggtgcaagtatagtaacaacgcaatcggccaaagcagaagtagcatcagcacttaaatcagaacagttagcaatgataagcgtatcaccaagcgcaatcacaactacaacgcaagcagtgaacgcagaacaaaatcatacggctaatcctgaacaggcggcaaagtctaacacagaaaatgtatcaacatcgccttcaactaaaacagaacagacaccaaaatctaacatacaaaaagcaacccaacaaacaccaagcgtaactacaacacctccaccaaatgcacaaccgcaatcaacacaaccaacaccaaaaccaacaacaccgccttcatctagtgtagaaacgcctcaaccgcaatcgcctaccacaaaacaagcacaaaagaaaataaaccctaaatttaaaggtttaagatcatattatacgaaaccaagtttagaatttaaaaatgagttgggtattattatcaaaaaatggacaacaataagatttatgaatattgttccagattatttcatatataaaatagctttagttggaaaagatgataagaaatatggtgaaggcgtgcaccgacatgtcgatgtatttatcgttttagaacaaaataaatatggcgtagacaaatactcggtcggtggtatcacaaaagcaaatagaaagaaagttgattacaaagcaggaatcagtattactaaagaagataaaaacggtacaatctcacatgatgtttcagaatacaagattactaaagaagagatttccttgaaagaacttgattttaaattgagaaaacaacttattgaacaacataatctgtacggtaatattggttcaggaacaatcgttattaaaatgaaaaatggtgggaagtacacgtttgaattacacaaaaaattacaagaacatcgtatggcagatgttattgatggtacaaatattgatagaattgaagtgaatctaaaatcatcgtgatggatgctacatagaacctatgaacgatgaaacgagaagttaagcaacaatgacctacatcattgcttagcttcttttgttttgcgtaatgatgttaagggaaaatattcacttgtttgtaaaagtgacatctcaaagtcttgaaaatgatgcaatgcccaatttgcatgcattgaatcgcttcgaaaccatctgtatttaacgaaaattatggattacttaacgatgattcaaatatagttaaacatggtttaatgtgaatagaccgatacgtcttctataatgtagttgtatgattctaattacgtaaagaacaatcgaataattacgattggagcatacaactatgaaaatgacacaaattgcgaaaaccagtttagcactatcacttttaacaacaggcgtaagtatagtaacaacgcaatcagccaaagcagaagtagcatcagcacttaaaacagaacagacgccaaaatctaacatacaaaaagcaacaacatcgccttcatcaaaagcagaagcaacacaacaaacaccaagcgtaactacaacacccccaccaaatgtacaaccgcaatcgccaaccacaaaacaagcacaaaaggaaataaaccctaaatataaggatttaagatcatattatacgaaaccgagtttagaattcgaaaagcaatttggctttatgttgaaaccatggacgacagttaggtttatgaatgttataccggattggttcatttataaaatagctttagttggaaaagatgatatgaaatataaagatggaccttacgataatattgatgtatttatcgttttagaggacaataaatatcaattaaaaaaatattctgtcgggggtatcacgaagacaaatagtaaaaaagttgatcataaagcagaattaagcattactaaaaaagatgaggaaggcaaaatctcacgcgatgtttcagaatacaagattacaaaagaagagatttccttgaaagagcttgattttaaattgagaaagcaactcattgaacaacataatctgtacggtaatattggttcaggaacaattgttattaaaatgaaaaatggtgggaagtacacgtttgaattacacaaaaaattacaagaacatcgcatggcagatgttattgatggtacaaatattgatagaattgaagtgaatctaaaatcatcgtgatggatactgcatagaaccgttgaacgatgaaatgagaagttgagtgacaacgatttacatgttgctcagcttctttcgtgttacgcagtggtataagaaggcgaatatttgatgttgaccaaacacaacatgcttatgtcctatatgtgtctaaaaataccaatctatcaagcgttgaagtacaacaaaagtcatttttatttaacgaacattatggattctttaatttaattaacgatgattcaaatatagttaaacaaggtttaatgtgaatagagacatacgccaactataataaagctgtatgattcaataaacgtaatcgaacaaatctaataattacgattggagcatacaactatgaagatgacagcaattgcgaaagccagtttagctctaagtattttagcaactggggttataacatctacggctcaaactgtagatgcgagcgaacatgaatcaaaatatgaaaatgtgacaaaagatatctttgacttaagagattactatagtggcgcaagtaaggaacttaaaaatgttactggctatcgttatagcaaaggtggcaagcactaccttatctttgataaaaatagaaagttcacaagaatacaaatttttggtaaagatatagaaaggattaaagcacgtaaaaatccaggtctcgatatatttgtagttaaagaagcggaaaatcgcaacggcacagtgtattcatatggtggtgttactaagaaaaataaaggtgcttattatgattacttaagcgcacctagattcgttattaaaaaagaagtaggtgcaggtgtttctgtacatgttaaaagatactacatttataaggaagagatttcgctgaaagaacttgattttaaattacgacagtatttaattcaagattttgatttgtataaaaagtttcctaaagctagcaagataaaagtgacaatgaaagatggcggctattatacgtttgaactcaataaaaagttacaaacaaaccgaatgagtgacgtcatagatggcagaaatattgataaaatagaagccaatattagataattcaacaaaacatggataatagtaaaatatggatagtatagatgagctaggcagcataggttgcttagcttcttttttgagtcatgataatcggaagtgaagtgggtcgatgaaagatgataacgacaataaaacttgtgaaaatggttgatacctatagttgcacggtgtcgcattggtgacatgaaacaatgtggaaaacataattaaattgaaggaaagtgtgaatggtgaaaaaaatagcatagtgttataaaaaatgattaatactgttaggattccattaattagcttaacgttggttcaggaatagttaaaatggggttaattcatagcgcagtatcctgcatatataatgatagtagattgttcgtattacgtaattgaattaatcacataaacatatattaagacaaaatttataaatagattgggagaataatactatgaaattaaaaacgttagctaaagcaacattagcattaggtttattaactactggtgtgatgacagcagaaagtcaaactgttcacgcgaaagtaaagttggatgaaacacaacgccaatattatataaatatgctaaaagattactattctcaagaaagctatgaatcaacaaacattagtgttaaaagtgaagattattatgggtctaacgttttaaactttaaccaacgaaataaaaatttcaaagtatttctaattggcgacgatagaaataaatataaagaactgatgcatggccgtgatgtctttgcagtacctgaattaatagatactaaaggcggcatatataccgttggcggtataacaaagaaaaatgtgagatccgtgtttggctatgtaagtcatccaggactgcaagttaaaaaagttgatcctaaagatggcttttcgataaaagagttgttctttattcaaaaggaagaagtatcgttgaaggaacttgattttaaaataagaaaaatgttagtcgaaaaatatagattgtataaaggcgcgtcagataaaggtagaatcgttattaatatgaaagacgaaaagaagcatgaaattgatttaagtgaaaaattaagttttgatcgtatgtttgatgtaatagatagtaagcaaattaaaaatattgaagtgaatttgaattaattaagcataatagattaagaagcggcttaacgacaaaatgtgcattgacacccgtgtccttatataaggaaccgtgttaaatacattactgttgttaagttgttttttgcatttcaaagtgcagaacagagtatcaacatttgttgtagtaaacaatgactcagctaaacaacgacatgtaaagcgtgaaaggcattgaatctgaacattaaaatatatttgtttttcattaataataattcacgcatatttaaatcgaggttaattatcgcgttaaatgatagacgttataataagcctatatgattcaaattacgtaatgaaaacaatccaatatattaagattggagtaaataaatatgaaattgacagtattagcaaaagctacattagcattagggattttaacaacaggaactttaacaacagaggcccattcaggtcatgcaaaacaaattcataagtcagtaaacaaacatgacaaagaagcattacaccgatactacagtggaaactttaaggaaatgaaaaacattaatgctttgaaacatggtaaaaacaacttacgttttaaatatagaggtatgaagactcaagtattattgcctggagatgagtaccgtaaatatcaacagcgaagacatacgggcttagatgtgttttttgttcaagaaagaagagacaagcacgacatatcatatactgttggtggtgtaacaaagaccaataaaacatccggctttgtcagcacaccaagattaaatgttataaaagaaaatggtgaagatgcttttgtgagaggatacccttatgatattaaaaaagaagaaatatcactaaaagaattagattttaagttgagaaagcatttaattgagaaatatggcttgtataaaacgatttcaaaacatggtagtgttaaaatcaacatgaaagatggcagcttttataaccttaatctaaggtgtaaattagcgttcaaatatatgggggaagtcatagaaagcaaacaaattaaagatattgaagttaacttaaagtaattaattacgaacaataaaaagtaattgaagcggcttaacgatgaaaagtaaattggtgcgcataccttacaaataaggatgcgtcaatcgatatcgtcgttaagccgttttgtttgcgttttatgaattctatcccaatctccatgaatataaaaatttccaccaccgacatcaaaattctcaacatcgcaacaaaaccaaatgttataataaatctattacacaaagagataaattacttattcaaaggcggaggaatcacatgtctattactgaaaaacaacgtcagcaacaagctgaattacataaaaaattatggtcgattgcgaatgatttaagaggaaacatggatgcgagtgaattccgtaattacattctaggcttgattttctatcgcttcctatctgaaaaagcggaacaagaatacgcagatgccttggcaggtgaagatatcacgtatcaagaggcatgggcagacgaagaataccgtgaagacttaaaagcagaattaattgatcaagtcggttacttcattgaaccacaagatttattcagtgcgatgattcgtgaaattgaaacacaagatttcgatatcgaacatctggcgacggcaattcgtaaagttgaaacatcaacactaggtgaagaaagtgaaaatgactttatcggactgttcagcgatatggacttaagttcaacgcgactaggtaacaatgtcaaagaacgtactgcactaatttccaaagtcatggttaatcttgacgacttaccattcgttcacagtgacatggaaattgatatgttaggtgatgcatacgaattccttatcgggcgatttgcggcgacagcgggtaaaaaagcaggcgagttctatacaccacaacaagtatctaagatactggcgaagattgtcacagacggtaaagataaattacgtcacgtgtatgacccaacatgtggttccggttcattactgttacgtgtaggtaaagagacacaagtgtatcgttatttcggacaagaacgtaacaataccacttacaacttagcgcgcatgaacatgttattacatgatgtacgttatgaaaatttcgatatccgtaatgatgacacgttggaaaatccagcctttttaggtcatacatttgatgcggttattgcgaacccaccatacagtgcgaaatggacagcagattcaaaatttgaaaatgacgaacgattcagtggttacggcaaacttgcgccaaagtctaaagcagactttgcctttattcaacacatggtacattacctagacgatgaaggtaccatggcagtcgtactcccacatggtgtattattccgtggggctgcagaaggtgtcattcgtcgttatttaattgaagaaaagaactacttagaagccgtgattggcttaccagcgaatattttctatgggacaagtattccaacatgtattttagtatttaaaaaatgtcgccaacaagacgacaacgtactatttatcgatgcatccaatgattttgaaaaaggaaaaaatcaaaaccatttaaccgatgcccaagtcgaacgaattattaacacatataagtgtaaagaaacgattgataaatatagctacagcgcgacattacaagagattgccgagaacgattataacctaaacataccgagatacgttgatacattcgaagaagaagaaccgattgacttagagcaggtccagcaagatttgaaaaatatcgataaagaaatcgcacaagttgaacaagaaatcaatgcatacctaaaagaacttggggtgttgaaagatgagtaatacacaaaagaaaaatgtgccagagttgagattcccagggtttgaaggcgaatgggaagagaagaaggttggcgagttattagaatttaaaaatggtttaaataaaggaaaggaatattttggctcaggatcgtcgattgttaacttcaaagatgtatttaataaccggagcataaatacaaataatctgactggaaaagttaatgtgaatagcaaagaactgaagaattattccgttgaaaagggtgatgttttttttacaaggactagtgaggtgattggtgaaataggttatccgtctgtaattttaaatgaccctgaaaatactgtgtttagtggatttgtattaagagggcggcctaaatcaggaattgatttaataaataataattttaaaagatatgtcttttttactaattcatttagaaaagaaatgattacaaaaagttctatgacaactagagctttaacatcaggtaccgcaattaatagaatgaaagtcatataccctgtttctgctaaagaacagaaaaaaataggtgacttcttcagcaaactcgatcgacaaattgaactagaagaacaaaaacttgaattacttcaacaacagaaaaaaggatatatgcagaaaatcttctcacaagaattgcgattcaaagatgagaatggaaatgattatccgaattggagaacaattgaattaaaaaatattttagaaaacattgtggataatagagggaaaacaccagataatgctcctagtgaaaaatatcctttattagaagtgaatgcattaggatattatcgtccagcatatataaaagtaagtaaatttgttagtgaaaacacttataataactggtttagagaacatttaaaagaaaatgatattcttttttctactgtaggaaatactggaatagttagtcttatggataattacaaagctgtaatagctcaaaatatcgtaggattaagggtaaataataataacctcccttcatttatttactatatgctatcgtataagggaaatcagaaaaaaataaaaagaattcaaatgggggctgtacaaccaagtgtgaaagtttctcaatttaagtttataaaatatttagtaccaataaaagatgaacaagagaaggtagctaaactgttgattgaaatagataaattagtgaataaacaattaataaaaatagaattacttcaacaacgaaaaaaagccttacttaaatcgatgtttatttaaatctgctgaagtttattttataggaaatgatgatgtttcatcactcgattaataagtggagtttatttatgaagcttcaaaatcaaaaacgaacattaaatttaggcactgtgatagcacggtgtctttttgtgtcgaaattgtgtacagaataagtagttaaataaagattaagttgagataaagtgttattcgtaaataaaagagagtagatcgataggaattgaatgatattagttaactatttattaaattacttaataatgattaatttttagttaaagtaagtttaatgtgaagcacgaccgttgctcattataatgaatgaggattgttcgtattgcgtaatagaataaatcaaatagactaaaaattgggagcatagaattatgaaattaaaaaatattgctaaagcaagtttagcactagggattttaacaacagggatgattacaactactgctcagccagtaaaagcagaaagtatggatagctcattaactgctatttctaatgatactcaaaaattgaaagattattatacaggaacaagttttgattataaaaatttaaaagggtatagagaaggtaatatcgcaacatttatttttaattcacagcaaatagatgtaaatttaaccgaaaatgaaaaaaataagtttgaagatggaaatggaatacaaaatgtggatgtgtttgttgtgagagaaggatctggtaggcaagcaacagattattcaattggaggaatttcaaaaaccaatggggaaaattacaaagattatgtaaatagacctcatatagaagttaaaagagaaagaggaatgtttacaacggttaaaagtgatactgatttttacataaataaagaggaaatctcattaaaagaacttgattttaaattaagaaagcacttaattgataaacatgatctttataagacagagcctaaagacagtaaaattagagttactatgaaaaatggtgatttttatacttttgaattgaataaaaagttacaaactcatcgtatgggtgatgtgattgatggtagaaaaatagagaaaattgaagtgaatttataatattattcgagggagtatatcatgagggaaaattttaagttacgtaaaatgaaagtcggtttagtatctgtagcaattacaatgttatatattatgacaaacggacaagcggacgcatcagaaaaagaaaataacaatcagcaagaaagtaatgaaaaagctcatacagaaaaaaataatgcacaggttaaaaacactgatgttaaaactgcaactgacaagccagctaattttgtaaatttggaagatgttaagccaggtgatacatcaattaaaggtaaaacattaccaaatcatataattttattgaatatagacagacaaagtgccgattcatttgaaggctctgatggagagcttgttatgtcagatgataaaggtaacttcaattatgatttaaaagaccgtaaaatagtccataatcaagaagttgaagtttcatcatcatctttagatgatttaggtgatgaagaggaagaggttgaagaaaaagaagaagttcaagaagaggaaacaggtgctaaatctactgtcacaacaccaaggtatgaaaaagcatataaagttccaaatcagcaattaaaacaagaaaatggacatcatcaagtattagttgaaccaattaccgcaggatctggtattattaaaggtcatacttcggtgaaaggaaaagttgctctttcaattaataataaatttattaatcttggtgatagtactgatgttgaaaatcgtttaactgaagaccaaggaaaaactaggtatcaaggtatttggaaacatatagatgataaaggttattttgaatttgatttcaaacgtaaaccatatgataacttaaaattgaatccagatgataatgtgtcattaacattcttgccaaacgatgaagaagaagctttaaagccaattatatttaaaacaaaagtaacaagttttgataatattgaatctgctataactagctataatcctaaaaatgtcaataaagtaacaactcttactaatgtaaaagaagacttagtagttgaagatatttatggctttgaatataaaagtgaacaaggaagaggaattcctcaaaataatagccatagtactaaagaaattaaaggtaaaacaaaatttgcgaatgcagttgtaaaagttgattctgaattaggtgaaggtcaagaattcccagatttacaagttaatgaaaatggggaattcacttttaattcgtttgacgctggttatagattatacaatggcgaaaagttgaactttactgttgtagatccaattactggagacttgcttagtcaaggatttgttagcaaaaatatagatgtttatgaatcgcctgagcaaaagaaagagcgagaatttgatgaaaaacttgaaagtattccggcttattatcaattacacggagacaaaataattggatttgatactgagggtggtgtatcaacttggtttgatgcacttgataagaaagaactggaaaaagttcttcgccaatactaattaaataaaacagcttaatgatgtaatgaaactagtgagttaatcactgacttctacgtcattgagctgttttttatttgcttcgttacaaagcattattgaatttattttacgtgttcatattttgaaacatcaaagccgtcttgcttagctttgttgataatgtctttgattgaatgtagtcctttatcggcgaagtatgatcttaagttgtcttttgtagcttggtcagcattcttatctaataacacatcgatatagcttaattcatgttctaagaagtttgcatcatcatgtagtacgagtccattttgagaataaacttttgcatctgcttgattaccatatccaacaaccccagttgctaatacacctaccattgccgtagctactaaaacttttttaaatttcatatctatcactcctctaaaaattgtaactctatcataacactgaatattaagaaaattacgtttattaagtcgaattaataatttttaataaatagttaaagtggcaaatattgctaaaaagcaattaatctttagtgcgatgcttatggattttcctactaaaaccttgatttcaaagagggtttaaatcaaatgaaacaataataaaaaaatgacgcaacataataataagtacaaatttaattaagaaataaaattgattgtatatgtatattttggtaacgtaaaagagaaatatacaaaataattaattatttatatgaaaagagaatataaaagaagtataaaacagagagacgtgaagcgatgggatatttaaaaaggctttcatggtacataagtatcttaattttaatagttgttatagcaggttgtggcaaaggtaatgaaataaaagaagattcaaaagaaacacaaatcaaaaagagctttgcgaaaacattagatatgtatccaattaagaatctcgaggatttatatgataaagaaggatatcgagacggtgagtttaaaaagggcgataagggtacatggactttactcacaagtttttcaaaaagtaacaaaccgggtgaaatagatgacgaaggtatggttttattccttaatagaaatacaaagaaggcaacaggatattattacacgagcaaagttcatgatgaatttaatgaaaaagatcaacaaaaaaaatatcatgttgaattaaaaaataataagatagtacttttggataaagtagaagatccaaagctcaaaaataaaatagaaaattttaaattctttagtcagtatgctgattttagagatcttaaaaattataaaaatggaaatatatcaagtacagataatgtgccaagctacgatgcagaatataaaatgagtaatacggataaaaatgtaaaaaaacttagagaagtttatccgattacaaccaaaaagtcgccagtattaaaattacatatagatggcgatataaaaggaagttcagttggttataaaaatatagaatataatttttcaaaagtaaaagaccaagaaactgctgttagagattttttgaattttggaccatctgatggagttagctaaagataattagatgtagaaataattctaaaacagagagacgtgaaacgatgggatatttaaaaaggattggaatgtgtataagcctgttgattgtaatcatttttgtaacatcttgcggtggtggtaataaaatcactgaagattcaaaagaaatacaaatcaaaaagagctttacgaaaacgttagatatgtatccaatcaaaaatcttgaggatttatacgacaaagaaggataccgagatggcgaatttaaaaaaggtgacaaagggatgtggacgatatacacagatttcgctaaaagtaataaaccgggtgaattgaatgatgaaggtatggttttaaatctggataggaatactagaaccgctaaaggccattattttgttactacattttaccggaatggtaaactaccagatgaaaagaattataaaattgaaatgaaaaataataagattattttattagatgaagtaaaagatgataagctcaagcagataatagaaaactttaaatttttcggtcaatatgcaaatcttaaagaattgaaaaaatataataatggtgatgtttcaattaatgaaaatgttcctagttatgatgttgaatacaaaatgagcaataaagatgaaatagttaagcaattaagaagtcattataatatttcgactgaaaaatcacctatattaaaaatgcatattgattgggacttgaaaggcagttccgtaggttatagaaagttagaaattgacttttcaaaacgtgaaaacagcaaattatcagtcattgaatttttaagttataaaccagcgaaaaaatagtattgataaggaatattaaggggtgaaaaaatggaatatctaaaaaagcttgcactgttcataagtgttattattttgagcatttttataataggttgtaatagttcaagcgatactgcagaaaaagcaaaagaagattcaaaagaagaacaaattaaaaagagctttgcgaaaacgttagatatgtatcctattaagaatctcgaggatttatacgacaaagaagggtaccgagatggcgaatttaaaaagggagacaaagggacgtgggttgttagatctgaaatgataattcaaccaaaaggtaaaagtttaacttcaagaggcatgatattatacatgaatagaaatactaggaccacaactggttatttttcaatagaagagatagattcaagaaaaagtcttgatgaaagagaaacagaaaaaaagtatcctgtgaaaatgaaaaacaataagattattccaaatgaggagataaaagatgaaaagttgaaaaaggaaattgaaaactttaagttttttgtgcaatatggcagttttaaaggaatagagaattatgaaaatggtgacatttcctacaattctgaagctcctatttattcagcgaaatataaactgaaaaatgatgattataatgttaaagaattacgaaaaagatataatattccaacagaaaaggcgcctaaattgttgttgaaaggttcgggggatttgaaaggggcttcagttggatataaggaaattgaatttatattcctagaaaacaaaaaagaaaatatatatttttcagatggattaaacttaattccaagtgactaaaaataacacaaaggttgatagtgctcaacaaatattaacatgatagagagaagtgaaaaagtgagatttttaaaaagagtcgtattgtacataagcattatggttttgagcgtttttataatgggttgcgatagatcaagcgatactacagaaaatcaaagagaagattcaaaggaagaacaaatcaaaaagagctttgagaaaacattagatatgtatccaattaagaacctagaggatttatacgacaaagaaggataccgagatggcgaatttaaaaagggtgataaagggatgtggacgatatatacagatttcgccaaaagtaataaacaaggtggattgagtaatgaaggtatggtcttatacttagatagaaatacacggactgcaaagggacattattttgttaagacattttatgaaaagaataaattcccagatagaaaaaattataatgttgaaatgaaaaataataaaatcattttattagataaagtagaagatacaaatctaaaaaagagaatagaaaactttaaatttttcggacaatatgcaaacctaaaagaattgaaaaactacagcaatggtgatgtctcaattaatgagaatgttccaagttatgacgcaaaatttaaaatgagcaataaagatgaaaatgttaagcaattaagaagtcgttataatattcctactgataaagcaccggtattaaaaatgcatattgatggtaatttgaaaggaagttctgtgggttataaaaagttggaaattgacttttcaaaaggtgaaaaaagcgaattatcagtagtcgattcattaaattttcagccggcgaaggtggatgaagatgatgaggatggtgtgtaacaatgaaatctataaaaaggattggattgtgcataagtctgttgattttaatcatttttgtaacatcttgtggtggtaataagatcatgggagattcaaaagaagaacaaatcaaaaagagctttgcgaaaacgttagatatgtatccaattaagaatctcgaggatttatacgacaaagaaggatatcgagatggcgaatttaaaaaagatgataaaggtacttggctaattagatctgaaatgaaaatccaattaaaaggagaaaatctggaatctagaggggcagttttagaaattaacagaaatactagaacggctaaagggcattatattgttagagaagttgttgaagatagcgatggaatgacacacaatcatacaaaaagatatcctgtgaaaatggaaaataataaaatcattccattaaaaccaatcgatgatgaaaaagttgaaaaagaaattgaaaaatttaaattctttgtgcaatacgggaatttcaaagaattgaaaaactataaagatggtgaggtgtcatataacccagaagtaccaatttactctgcacaatatcaattgaaaaacagtgattataatgtagaacaattacgtaagcgatataatatcccgacgcaaaaagcgcccaaattattattgaaaggctcaggtaatttaaaaggctcatcagttggatataaaaatattgaatttacctttgttgaaaataagaaagaaaacatttacttcacagatagtgtctactttaatccaagcgaggataaataaatataattactaatataaaaaataacgttagaacatttaataataaagttaaatgaattacatttattaaattgaataagttagttttgtttgataacataaaagtgtaataatcactattttattaagttgtatgaaatattcaaatgtgtataaaaataaagcagagagatgtgaaatgatggagtgtataaaaaaaattgctttgtacatgagtgtattacttttaatcatttttattgggggatgtggaaatatgaaagatgaacagaaaaaagaagcacaaacaaataaaacagattcaaaagaagagcaaatcaaaaagagttttgcgaaaacgttagatatgtatccaattaagaatctcgaggatttatacgacaaagaaggatatcgagatggcgaatttgaaaaaggtgacaaagggatgtgggttctctattcatctattgtatcggaattcaaaggtgagagattaaaatcacgagggatggtattaaagttagatagaaataagagaactgctaaaggaagttatattattagagaattgaaagaagataaaaatcatgatgttcaaaaaaacgaaaaaaagtatccagttaaattggtgaataataaaataattccaactgaagatgtaaaaaacgaagatttaaaaagagaaattgaaaacttcaaattattttctcaatatggtgaatttaagagtttaaatacggataggataacaaatatttcttataatcctaatgcgcctaactattcagctgaatataaaattaatgatgatgataataatataaaacaattaaaaaatcgattcaatattaagtctaataaaaatcctaagttattgttcaaaggagcaggtaatataaaagggtcttctgttggatataaggagatacagataattttcaataggaacaaagaagaaagtgtttcttgtattgatagtatagagtttaaaccgagtgaaggagaccataatgagtaagagtgactataaattagatgttggcaaattaaaaaaagatactgaaccgacaagcgcaatatcatttatggcgtatgaaattgaaaatgctaataatcataatttgagtaagatggcaataaaggaacagttagacagaagcacagaaaggggcatgttcccttctaatcttgaatatgttgatagttacactgattctcttactggagtaacaacttctgcttttttaaataaagatacaggcaaagtaactctcgggatgactgggactaatttacaagacgaagcctttaaaaagttaaaagaaggtgaattttcaagacaaaatgttaccaatgctttggaaacagttaaagatggatatgcagatcttaaaatattatattctcctgcatctgatcaaaactatagatatgcgaatacacaagaatttataaataaaataaaaagtaagtatgacattgattttattactggacattcactaggtggaagagatgcggtagttctaggaatgagtaatggtattccgaacattgtggtttataatccagctcctatttctataactagtttgaatcctaattccccagatggaaaacgattgttagagttatataaaaattataaaggtaatattactaggtttgttgcagaaaatgatgcattgacagaaaatctgaagaaatataagcattatgtttttttcggtaatgataaagtctttaaaaatggtaaaggtcatgaaatgaaaggttttttaaccaaagaagaacaaaaagctataaaaaaagaacttaaaaaactacaaggttatgcagaagaaaataataagtcatttgtaaagcattcaaataatgctatctctaaattagctagtatagaattacttagagccaatatgatgactacaaatggaggaggattatcttcttcgcagcaaaaagttttagaaagtttaacagctttaacaattgcgcagtcattcagtcaactgatagacgatgaaattaatcaaatcaaaaaaatgtataatgaaaagaaaaagaaatttggaaaaaattgggaagacgctcaaaaagctggaaaagctgtaggtgaagatttgagtgtaaatggagttctcaatgctttagatgaaggtcaagtgaatgaaagtagtatggtaagagaacctgaacaaatgatatctgcaaaagaaagacaactttcaacgatagggtcttctgtatcaaattatattatgagagttagactcagtattaatgaaatcgttgataaagatcaagtgcttgcatcacaaataggtggattactatgatgtttaatcaaattaataataaaaatgaattagaagaatcatatgaatctgagaaaaaacgtatagagaatgaactgcaaaatttaaatgaacttaggcatagaactcgaaaagaaaatgaacgtagttatgatgtttttcaatatttgaagcacgaaatgaattatagtgaagatgcccaaaggaaaatgacgagaaatatagaagcgtatgagcaagaaatcaatgagataattagaaagcaagaatggaaattagaagaatataaagaagacttaaaaaagtcttatgaaaagcagttagataaactaagtgactgataatttggaggagattaaatgactctaatagaaccagatatgaacttaagaatgccagatataagtactacagtagaaacacttaatctcatatctaaaatggaagcgcaaaaagaaaatattcgttcagttattgcacctgaacataagcataaatataaagatattgaaaacggattaaaaggtgaagaaaaagtattgattgaacaaatggcgcagcattgcgaagcttttaaagctaattttaaaggtgcagctcaaggagattgggttaaaagtgccatgtctgagatagacagtattaaggatgatttgaaaaaattaatagctaaactacatatcatactactaaataaagctcccttcaaaattttcattttttcaatgtctactttggagggagcgcttcagtatattcacaactgacactaggccgcttctttttaatttattcaactataaagtaattcgaactgaatcgaaatatcacactcacaaatgtaaaaacgcaacttaaattactgtcccacattaaacatatccacattccaaacagcaacaacaaaatcctcaagtaccaaaaacgatgaccgctttatcaaaatcaacgcaagttaacctctcccgaactccccgctatagatcatcatcaccttacaaaccataaagcgctgcagttaagtattgaatggcatagccaattgaaatgaaaatagcaatcgttataatagcactaccaatggtatataaagtatgtttcgtagataatccttcagtctttgaaccaaaaacacttagtagaataaatgcaataccaatgatatataaaactaaaatgacaaatagcatgtttatacacctcgcttctctttcgtgagatatatctttgtctccattataaagtaaagtgctcaataatttaattaagtatactatttttttattatcgaagattgcgaaagatgaaacgctcctatataatgtaaaacggaattattcctatttacaaataaattgaagtgagggtatatatatatggctaaaattccagttacggtattaagtggttatttaggctcggggaaaactacgttgttaaatcatattttacaaaatcgtgaaggtcgacgtatcgcggtaattgtaaatgatatgagtgaagttaatatcgataaagatcttgtcgcagatggtgggggactatcgcgtacagacgaaaaattagtcgaactatctaatggttgtatctgttgtacgcttagagatgatttattaaaagaagttgagcgtttagtaaaaaaaggtggcatcgatcaaattgttattgagtctacagggatttcagaaccagtacctgttgcgcaaactttctcatatattgatgatgaacttggcattgatcttacagcaatttgtcgtttagatacaatggttacagttgttgatgctaaccgcttcgttcatgacatcaactcagaagatttattgatggatcgtgatcaaagcgttgatgaaacagatgaacgttcgattgctgatttattaattgaccaagttgaattttgtgacgtattgattattaataaaattgatttaataagtgaagaagaacttgcaaagttagaaaaagtgttaagtgcattgcaaccgactgctaaaattattaagacaacaaattctgaagtagatttaaaagaagtcttaaatacacagcgttttgattttgaaaaagcgagtgaatcagcaggatggattaaagagcttgaatctggtggtcatgcatcgcatacgcctgaaacagaagaatatggcatatcatcatttgtatataaacgtcgtctacctttccatgctaaaaggtttaatgactggttagaaagtatggcaagtaatatcgtacgctcaaaaggtatcgtatggttagcgcaatacaatcatgtagcatgtttattatctcaagcagggtcatcttgtaatatacatccagtaacatattgggtggctagtatgtctgaagtgcaacaaactcaaatattagcagaacgtcaagacgtcgcagctgaatgggatccagaatatggcgatcgtcatacacaatttgtcattattggtgccgacttagatgaaggtgcaattacaaaagaactcgatgcatgcttagtcaatgcgcaagaaattgatggagattggcaacaatttgaagatccatatcaatggaaaattagaccggcacgctaagttaaatgaagtataatcatttttaaattgtggcttaattgtttgcaatttatgacaattaataaaaagttaagatgttcttaggatctttttgttttcaatctatctaaagtgtgatagttttgataaagcagaaatttgcattttatccatagggctaggacatgtatgtgtcttagtcctttttatatttgcgttgatgaaaaatgataaaaccatcgtaccaactgttaattgaaagtacaattattgtttaacggtcataaaaatgagtgaagtaattgcagctatcaatgtactattactgcttacggtcacacgagtgtttcagactaaacgtgcaacgaaattctgcacgcggccaatatatcttgcgctagatcaagaagatcattaagatttcgcacgccaaatcatgaatgtcttagacctcgagtatcaaacataaaacacgccacaaaaatataacgcgtcagactacaaagatcacgaatattccttacgtaccaccaagaacatcctatacaaaaaataccaagaccatttatttgcaacaaactacccagactcacctcacatcaataaatcaacacaaagcaaagccaccatccctattggtatagtggcctgagaattttaagtattcaattcgcttaaattattttgcgaaaatgtcgataattgctttgatgattttaatgatagtacctacaatagccatcgttttgtcctcctgtatgttgatttaacatagtgatgagttgttgatcgttaatgtttgagattagttgttacctaaaaatttaccaagtaaatctttaaagaatttgaataattttgctacgaattccatgtgaatggcccccttcaaataagatgttcatatctatgatatttttataacttacttaccagtgaatttctcaattaatcctttaatgaatttaatgattcctgcaatgatacccatgtgaaagacctcctttgtttgttatgaaaacttatttaccagtgaattgttcgattaagcttttgataactttaatgatgccagcgatgatacccattaagattacctcctttgcttatgagttaacttcattgtacatagttatcttgtgcgtaattgatttttttcctaacttgaattgttatgatcataactgcgaattttttattttaaaaggacgggaaatactgcctaactgtacaggtgcatttacaaaatctttacaatcattggtttaatagaggttaagctcatgaatttgacatgaagcagaaatttaattatattttatgttataagtttaaaacgaataacacgttaggtctcgtctaggcaaagcatatttatgaagatgaattgaacagacagaagtaacattttatatacatatgtgcatgggagcacgcttaaagagaacagtgtaacaaggtatatcaaccatggtgcagtgtctagttaaactgaaacctgcaatagtaaattttctgccattatgtacagaatctactattgtaggtttttatttttatacataagcattatgcgagagattagaaataaggaggttatgcagtgttaagttttcaattgctattttcactgtttgttattgcgcttatcattgcattgataagtggcttgttgtttttagcaccagttatgccaatgagatatattaaattacatttatacatactagtcatgccagtattaattgcagtcattggctttttcggtattcatggtcaacatgtcttaggcccatttaaaatagatcgtttatcttggttattagctggctttgtaatggcgcttggctttattattcaaaagttttcaatgcgatatttactaggtgatcatcattatagacattactttccattgttcactgcgattacgtcgtttgcatctttagcatggatgtctgaagacttaagactgatggcactctgctggggtatgacattattatgtttaacattgctgatgaacgttaatcgtttttggaaagtgccacgtgagtctgcgaaattatcaagcatgacatttttatgtggttggcttgcattcgttggcgcaattgtaactatttatattgcgactgacgagtggcgtgtgcctcaacatatgtctcatccgtcatggtcattgattactgatgtactacttgtattagctgtcatgataccggcagcacaatttccttttcatcgatggttgattgaatctgtaacagcaccaacgccagtatcggcaattatgcatgcaggaattgtgaatgcaggtggtgttattctaactcgttttgcgccgatatttgataatggatttgcattatcattattacttatcctttctagtatttctgtattgttaggatcgggtattagcttagttcaagttgactataaacgccaattagtgggctctacgatgagtcaaatgggctttatgttagttcaatgtgcattgggtgtatattcagcagcgattattcatttaatattgcacggtatttttaaagcaacattatttttacaatcaggttctatcgtgaagcgattcaatattccaaaacaagcatctgctaaagacgcttatggctggattgtcatgggacgtgtattagctattatcgtggcatttctgttttggattagtagtgacagaagtgcatatgaagtgttaagtgcactcattctagcatggtcattacttgtatcttggaatcaaatggtagcctttagtaaagggcgtatggcacgtctggttggcatgattttgatttcaattgtgacatttatctacatcatcacacataattatttttacgatgtattacaaaatataacaacacatgcgacaacaccgcctacaattagtgtcatcattagtgttgtcatattaatatttggtagtttattaagtatctgggtatcgcgtcatcgatactctaaggcttttgcggtattgtacgtgtggttagttaatctaggtgaagcacgctcgaaagcgatagaaagtcatccgaattatttgaagaagtatttataggaggtgaaaggtatgacaacacagttaaatatcaattcagtcattgaaaatgcgaaacgtgttattacaccattatcaccgatttcgatttttgcagcacgaaatccatgggaaggattagaagcggatacgtttgaagatgttgcaaaatggttacgtgacgttcgcgatgtggatattttcccaaataaagcattaatagaaagtgctgtggcacgtggtgaattagatgaaagtgtctttaatcaacttgttactgatatgttacttgaacatcactacaatatcccgcaacactacatcaatctttatattgataacattaaaacattaaaagacgtacctgcatcatatatgaatcattcaaatgttgttgctgatctactattagaaaaatcaaaacttgatatggctgattcatatcatcactatgatgtacgtccgatgagtgatgcaataatagatgaacaaggtgagccacttagcgaacaagtgaatcgtcaaatgattaaatggacgaaactttatatcgatcaatttctatcgagttggacaatgccgaagcgtgagcaaagtttttaccatgcatggttgcatttagcgcaacatgaccatagttttactaaagcacagcgccaagtgattaaaggcttgcccaatgatcctaaaatgacgatagagtcagtattaaatcatttttcaattgcgcaggaagactaccaagcttatgttgaaggacatcttttggcgttaccgggttgggcaggtatgttgtattaccgttcacaacagcatcactttgaacaacatttgttaacggattatttggcaattcgattagttgtcgaacaattgctagttggtgatgagtttaagtcagtcgctaaagattgtgaaagtagatcggaaaattggtttaagcaaactgttgcatcatggtgttactacagtgatatgcctagcgatgtattactacaacatgacgtcaatgaaattcaaacgtttattcactttgcagcaactatgaataaaaatgtatttaaaaatttatggttgattgcctgggaaatgacatacgaatctcagttaaaacaaaaaattaaagcaggtcatgaaagtttggcgggcgtattagatgtaaaccaagtaaatgttactgaaaatgacaatgctaatcagtcacattcagtatcgttaaatgccacacaagcagttgatgaaaataatagcgagctaaatcaggggggcacatcaacgaaagcgcaaattgcattttgtatagacgttcgttcagaaccatttcgcagacatatcgaagcagcagggccctttgaaacgattggtattgcaggtttctttggattacctattcaaaaagatgccgtagacgaacaattcaaacatgattcattacctgtcatggtaccgccggcatatcgcattaaagagtttgcggaccgttacgatatgaatgtttatcgacaacagcaacagacaatgtcatcgatgttttacacatttaaattgatgaaaaataatgtcatgcctagtttgttattgcctgaattaagtggaccatttttaagcttgagtaccattgtcaatacgattatgcctagaaaaagtcgcgcgtctttacaaaaaataaaacaaaaatggttaaaaaagcctgaaacaaagttaacgattgatcgtgagtttgacagaacatcagacttacctgttggatttactgaacaagagcaaattgatttcgcgttacaagcgttgaaattgatggatttaaccgaagcatttgcgccgttcgttgtgttagcaggtcatgctagtcattctcacaataatccacatcatgcatcacttgaatgtggggcttgtggtggtgcatcaagcggatttaatgctaagttattagcgatgatatgtaatcgtctaaatgtcagacaaggattaaaacaagcaggtgtagtaattccggagaccacggtctttgcagcagcagagcatcatacgtctactgatacgttggcatgggtatatgtgccagatacattatcagctttagctctagatgcatatgaatcattgaatgacgccatgccgatgatttctgaacacgcgaatcgcgaacgtttggacaaactgccaacgattggtcgagtgaatcatccagtggaagaagcgcagcggtttgcaagtgattggagtgaagtacgtccagaatggggcttggctaaaaatgcatcatttataattggacgacgccaattaacaaagggcattgatttagaagggcggacatttttacacaattatgattggcgtaaagataaagatggcacattgttaaataccatcatttctggtccggcacttgtggcacaatggattaatttacaatattatgcgtcgacagttgcgccgcatttttacggaagtgggaataaagcgacacaaaccgtcacgtcaggtgttggtgtcatgcaaggtaatgcgagtgatctgatgtatggcttatcatggcaatctgttatggctgctgatcgaacgatgtatcattcgccaattcgtttgcttgtcgttgttcaggcacccgactatgttgtagcaagactactcgcgaataatgagcatttcgctaggaaggtgtctaatcattggctgcgtttaatgagcgttaatgaggaagggcgttttaaaagttgggtttaacgatgaaatgttgcgatgctaagtaactaatatatcatcaaatctacaatgttctagcttcttaaaatatactaaaaatgataaacttaatgtaatagttgatgtcgtgataacgatacaaagatgaagtaatcaattttaatattattggagttagtgatatgaaaagaacgaaaggtgaaatcgaagctgaaatcagtaaagccattacgcaatgggaaaaagatttccttggcagaggttccttgtcggttaaatcagacattttaagagatatggtgattattagtttgcaaggtatcttaacgccagcagaatatcgtgtatgtagtacgaataaaggattattaaatattaaacgaacacgttctgaattagttgaatccggtgagcaagatttgaatgatatcatatttaaaattacaggtatcaaagtgatgagcttccatagtgatttaagtacagttacaggtgaacgtattatcgtattcaaacttgaggataatttggaaaagcatatttaagaaggttaggtatgcttctgcaggcttattaaagctatagaagtatgcttggttaaacagcgcaacgccatatatttgggtgtgctgtttttctattatatgatgtgtttattacgtggatgaatgcgtgggtctgaatatagcccgtgaaaggcatatgtcataaaatttgcgaatggtgacaagtcaacgcaagcatatttgttgcgagacatgtccacaatccttttacataaagagtgtatgtatgacgtatgcatataatcgataaaatatacctaaaaaattaggtataatgaccattgttgcaataagtttttcggccttgaaaccgataacgcatagtataataggaataaaatataatacaaatatccagtaaatcaaatttgaaaacgatggatgtataggggtaaagaatctaactaatgtaatgattaacgctatatagacaaaaattactctattgatacgccctaccccctctgtataataaatataaatcgtactaaattgaaaatagcaaaatattgttatttcaattatacaatgttttatttgcaatatacataacaatatcaagtttataaatttgatattgtcggtaaagtgaaatttgtggcacattgatattatggataacatttgtaaaatgaaaatgatgatacgaggagattgtaagatgatagataaaaaattaacatcaccaaaaatgacagtgcctttatttttaatcgcgctgattgtatttataggtatgttttacagtgtagtgacaaatcaagaatggcttaaaaatatagatatgggatcattaacatggtttacagattatttcggtgagccacaacgtcagtatgttaacaatttgtttaattactatatgacgtttagtgctgaaattggtgatgtcaaaggtgtcgtgttgatttccattatcgttacaatcatactgtttattaaacagaggcatttagcggtttggtttgtgacatatttggtttcaggtgtcatcatgaacaaattaattaaagatactgttttacgtccaagaccatataatcatttagccgttgatacaggcttttcatttccgagtggacattccaacgccagcacattattatatttcgccttaatgatcattattatttcagttgctgctaagacaataacaaaagtgttgagtgcgctggttatgggaatattatggcttagcatattattttgtcgcctttattttcatgcgcattacttttcagatgtcattggcggcacgtcactagcaatcatttgggtagcgttattcctaatggtatacccatactttattaatcatcgacgacaacgcgtttagcaaacatctttagacatagtggaggtatatagaaaaatgagaattaaaacaccgagtccatcttatttaaaaggcacaaatggacatgcgatattattattacattcatttacaggtacaaatcgggatgtgaagcatcttgcagctgagttaaatgaccaaggatttagttgttatgcaccgaattatccaggtcatggtttattgttgaaagatttcatgacatataatgtagatgattggtgggaagaagttgagaaagcttaccaatttttagtcaatgaaggttatgaatctatcagtgcaacgggtgtgtcattaggtggattaatgacattaaaattggcgcaacactatcctttgaaacgtatcgctgtcatgtcagcaccaaaggaaaagagtgacgatggtttaatagaacatttagtttattatagtcaacgcatgtcgaatattttaaatttagatcagcaagcatcgagtgcgcaattagcagcaattgatgattatgaaggtgaaattacgaagtttcagcattttattgatgatatcatgacaaatttaaatgttattaaaatgccagctaatatattatttggtggtaaagatgcgccatcctatgaaacaagtgcacactttatttatgaacatttaggatcagtagacaaagaattaaatggtctgaaggattctcatcatttaatgacgcatggagagggcagagatattttagaagaaaatgttattcgctttttcaatgctttaacataattgaagattttaaaaattaacacttgagtgacgatgttattatatttgtcatttgagtgttttttgtggcgtgatagtatagggaacttagacaaagttgatttgtattgtgatgttgtgggaattttatggagttataccagaagctggtttatattgtaatgtcgtgggaattttgttggcattgtacctgaagttgttatgtggcgagatgttggggatatagatggtgttgtatgtggcgagatgttggcgcacgtatacagcgttgaaccagaaattttaatgtagcgtaatgacaacacattacaagggatttactatattatgataaactcaggcgctaccgtattaatgaagcaattttgatgcaggtgtattgcatgttatttacatacatgttagagtgttacttaaacacgtagacgctttaacgctttaaaggagatgtgaatgatgaaaagacaacaatcacaatggaagtcatcaactggatttattttagctagtgcgggttctgcaatcggtcttggtgccatgtggaaattcccatatatggcagggatttatggcggcggtgcctttctagctatgttcttaatattcaccatttttgttgggttaccattactcattatggaattcactgttgggaaaatgggacggacatatacaacacaaatatatagtaaattaactggtaagaaatggctcaatatcattggctggaacggtaatttggcagtgtttattttatttggcttctatagtgttatcggtggttggattgtcatttacatcggacaagtattatggcaattagttatatttcaacgcatcaatcatctccaagaaatgaattttgaagcggtaatatcaaatccttggttaaccgttctagggcaaggtatattcatattcgctacgatgattattgtcatgttaggtgttgaaaaaggattagaaaaggcatcgaaagttatgatgccattgctgtttgtctttttaatcatcattgtgattaagtctttaacattagatggtgccttagaaggtgtgaaatttattttacaaccaagagtatcagagattactgctgatggaatcttgtttgcgctaggtcaatcattctttacgttatcattaggaactacaggtatgattacatatgcgagttatgcctctaaagacatgacgattaagtcatcagctatttctatcgtggttatgaatatctttgtatctgtattggcaggcctagctatatttccggcgttacatagttttgggtatgaaccacaagaagggcctggattattatttaaagtactgccaatggtctttagtcaaatgcatctaggcacattattctatttgggattcttagtgctgttcttatttgcggctttaacgtcatctatttctttattagaattaaatgtttctaacttcacgaagaatgacaatacaaaacgtaaaaaagtcgcagtgatcggtagtattttagtatttatcattagtattccagcaaccttatcttttggtatcttaaaagatgtaagattcggtgcgggaacgatttttgataatatggatttcatcgtttcgaatgtattgatgccattaggcgcattaggtactacgcttgtcgtaggacaattattagataaaaaattattacaacaatattttggtaaagatcgatttagattattcagtggttggtattacttaattaagtatgcgatgccagtcgttattattttagtctttatcgtgcaattatttagttaatatatagaagcatctgacacacaagtatttgtgttgctcaggtgtttttttgtttggaattgaaaagtttgtactggttctgaattaattgaaacttagataattgcaaaataacaaaatgtcgtttataattcttatctgaaaagtaagaattaaaattgagacatgaagaaaggtttcattcatttgatcggcatgtcagatgagggtgcatctatgattacttatgatttaattggcaatacaccattagtactgttagaacattatagtgatgataaagttaaaatttatgccaagcttgaacaatggaatcccggaggcagtgttaaagacagactcgggaaatatttagtagagaaggcaattcaagaagggcgtgtgcgtgcaggtcaaactattgttgaagcgactgctggcaatacaggcatagggttagctattgcagcaaatagacatcatttgaaatgtaagatttttgcgccgtatggtttttcagaagaaaagattaatattatgatagcgcttggtgcagatgtttcaaggacgagtcagtctgaaggcatgcttggagcacaaaaagctgcacgttcctatgctgaaaaatatggtgccgtttatatgaatcaatttgaatccgaacataatccggatacatattttcatacattgggacccgaattgacttctgcattacagcaaattgattattttgtggctggtattggctctggcggtacatttacaggtaccgcgcgttatttaaagcaacagcacgtgcaatgttatgccgttgagccagaagggtccgtgttaaatggaggaccagctcatgcacatgacactgaaggtatcggttctgagaaatggccgatatttttagagagacgtcttgtagatgggatatttacgattaaagaccaagatgcctttcgaaatgtcaaaagtttggcaaagcatgaaggattactggtaggcagttcttcaggtgcagcattacaaggtgcattgaatttaaaagcgcaattatctgaaggtacgattgttgtcgtatttccagatggtagcgatcgatatatgtctaagcaaatatttaattatgaggagaatgattatgaataagaaaacgaaattaattcacggtggacacacaacggacgactatacaggtgcagttacaacaccaatttatcaaacaagtacatatttacaagatgatattggtgatttacgtcaaggatatgaatattctcgtactgcgaatccaacaagaagttctgtagaaagcgttattgcggcattagaaaatggcaaacatggctttgcatttagttcaggtgttgcagcaatcagtgcagttgttatgctgttggacaaaggtgatcatattattttaaattcagatgtatacggcggtacttatcgcgcattgacaaaagtatttacacgatttggtattgaagtggattttgtagatacaacgcataccgattcaattgtacaagcgatacgcccaacaacaaagatgttgtttattgaaacaccttctaatccattattacgtgttactgacattaaaaagtctgctgaaattgcgaaagaacacggtttgatttcagtcgttgataacacatttatgacaccttattatcagaatccattagatttaggcatcgatattgtcttgcattctgcaacgaaatatttaggtggacatagtgatgtcgttgctggtttagttgcaacatcggatgacaagcttgcagaacgtttagcatttatttcaaattcaacaggtggcattttaggacctcaagatagctatttacttgtgaggggtattaaaacattaggtttacgtatggaacaaattaatcgaagtgttattgaaattattaaaatgttacaagcacatccagctgtgcaacaagtattccatccaagtattgaaagccatttgaatcatgatgtccatatggcacaagcagatgggcatacaggtgtgattgcatttgaagtgaaagatactgagagtgccaaacaattaattagagcaacatcttattacacattagctgaaagtttaggtgcagtggaaagtttaatttcagtacctgcattgatgacacatgcatccattccagcagatattcgagctaaagaaggtattacagacggacttgtaagaatttctgtaggtattgaagatactgaagatttagtggatgatttaaatcaagcactagatacgttataaataatagcagcactggcatatattttgacttcaacatttgttgttcttgaatatgctagtgctttttttgtgcgatgttaatatttagtaattgcgttgtggaggattgctggtcatttttattcatttaatttgacgatagccatagtcttgtcacaaggtataattattttttaattttttagaaaattcggcaaattgtattgacgatatatgcaattttgcatataatgctcttattcctagtggattaataagaatttgtaggaggggcgatgatgattgagtttcgacaagttagtaaatcatttcataagaaaaagcaaacaatagatgctttgaaggacgtatcatttacggtcaatcgcaatgatatttttggtgtgattggatatagtggtgcaggaaaaagtacgttggtaagactcgtgaatcatcttgaagctgcctcgaatggacaagtgattgtagatgggcatgatattacgaattatagcgataaaatgatgagggatattaagagagatatcggtatgatatttcagcattttaatttactaaattcagctacggtatttaaaaatgtagctatgccgctcattttaagtaagaaaagcaaaacagaaattaagcaacgcgtaacggaaatgcttgaatttgtaggattgagtgataaaaaagaccaatttcctgatgaattgtcgggtggacagaagcaaagagtggctattgcaagagctcttgttactaatccgaaaatactcctatgtgatgaagcaacaagcgcattggatccagcaacgactgcttcgatattgacgttattaaagaatgtcaatcaaacctttggcattacaattatgatgattacacataaaatgcgcgttattaaagacatttgtaatcgtgttgctgtaatggaaaaggggcaagtggttgaaacaggcactgttaaagaggtgtttagtcatcctaaaacgacgattgctcaaaattttgtgtctacagttatacagactgagccaagtacatcattgattcgtcgattgaatgacgaacaagttggcgattttaaagattataaaatcttcgtcgaggaaactcaggtgacacaaccgattataaatgacttgattcaaatttgtggcagagaggttaaaattttattttcatctatgtcagaaatacaaggtaacaccgtatgttatatgtggcttcgatttaatatggatcaacaatttgatgacacggcaataaatcaatatttcaaagagaaaaatattcaatttgaggaggtgcattaacatatgtttggttctgatttagacagtgcacagttattacaagcattgtacgaaacgctatatatggtatctattgctttatttttaggagcagtgattggtattccattaggtgtcttattggtaattactcgaaaacaaggcatatggcccaatatagtgatacatcaagttttaaatcctttaatcaatattttaaggtcactaccatttattattttgttaattgcgattgtaccattcacaaaattagtagtaggtacttcaattggtacgactgctgccatcgtgcctttaacagtatatgtggcaccttacattgcaagacttgttgaaaactcattattggaagtagacgaggggattattgaagcggcgaaagcgatgggcgcttcaccactacaaatcattagatattttttaattcctgaagcgttaggttcattagtattagcaattaccactgcgattattggacttattggaagtacggcgatggcaggcgctgttggcggtggtggtataggagacttagctttagtgtatggttatcaaagatttgatacgacggtcattattattaccgttattgtattagtcattattgtccaagtaattcaaacgctagggaatgtcctagctagattcatacgtagacattaatgatatatagtgaagattttgaaaggaattgatagaatgaaaagattgattgggttagttatcgtagcacttgtattattagcagcgtgtggcagtaacaatgataaaaaagtaacaattggtgtcgcatcaaatgacactaaggcttgggagaaggttaaagaattagctaaaaaacatgatattgatgtggagattaagcacttctccgattacaatttaccgaataaagcattaaacgatggtgatattgatatgaatgcattccaacattttgcatttttagatcaatataaaaaggcgcataaaggaacaaagatttcagcattaagtacaacagttttagcaccgttgggtatttactcagataaaattaaagatgtcaaaaaggttaaagatggtgctaaagttgtcattccaaatgatgcgtcaaaccaagcacgtgcacttaaactattagaagcagctggtttaataaaactgaaaaaagatttcggattagcaggcacggtgaaagatataacgtcaaatccgaaacatttaaaaatcactgcagtagatgcgcaacaaactgcacgcgcgttatctgacgttgatattgcagttattaataacggtgtagcaactaaagctgggaaagatccaaaaaatgatccgatatttttagaaaaatcaaattcagatgcggtcaaaccatatattaatattgttgcagttaatgacaaagacttggataacaaaacatatgctaaaatcgtagaattgtatcattcaaaagaagctcaaaaagcgttgcaggaagatgtcaaagatggagagaaacctgttaatttatctaaagatgagattaaggccatcgaaacgtcattagcaaaataaattatattgcgtcctacaagcaaagttcatgcttaagtttgtagggcgtttttgtttgcctataaaaatgtttcaaaagacagaaagggattgtaatcattttatagtgaaatattatgaaattgtaataatttagatattgtaaaatctaataagttgtaataattttaagaggtaattataaaatttgatgacacagtatatgatttttttgtaatcataatgtcatcaaacatcaacctattatacataattaaatcgtataatgatgtagtattcataaattcggataaaaagaatgttaggaaagttatgcaagaggaggattttaaagtgcaaaaaaaagtaattgcagctattattgggacaagcgcgattagcgctgttgcggcaactcaagcaaatgcggctacaactcacacagtaaaaccgggtgaatcagtgtgggcaatttcaaataagtatgggatttcgattgctaaattaaagtcattaaacaatttaacatctaatctaattttcccaaaccaagtactaaaagtatctggctcaagtaattctacgagcaatagtagccgtccatcaacaaattcaggtggcggatcatactatacagtacaagcaggcgactcattatcattaatcgcatctaaatatggtacaacttaccaaaacattatgcgacttaatggtttaaataatttctttatttatccaggtcaaaaattaaaagtatcaggtactgcaagctcaagtaattctacgagcaatagtagccgtccatcaacgaattcaagcggtggatcatattacacagtacaagcaggtgactcattgtcattaatcgcttcaaaatatggtacaacatatcaaaacattatgcgacttaatggtttaaataatttctttatttatccgggtcaaaaattgaaagtaactggtaatgcatctacgaactcaggatctactacaacgacaaatagaggttacaatacaccagtattcaatcaccaaaacttatatacatggggtcaatgtacatatcatgtatttaatcgtcgtgctgaaattggtaaaggtattagtacttattggtggaatgcaaataactgggataacgcagcggctgcagatggttacacaattgacaatagacctactgtaggttcaatcgctcaaacagatgtaggttactatggtcatgttatgtttgtagaacgtgtaaataacgatggtagtattttagtttcagaaatgaactattcagctgcaccaggtattttaacttacagaacggtaccagcttaccaagtaaataattatagatatattcactaaagtcttacgtatataaatatatataatgaattcctattacatttcacaagcggaaaagttagattgaatcctaaactttatggcggggctatcaaagtcgtgattgttgtaataggaatttttgtataagaaaaaggattggtcgaatgaacttcatgttctatgttcgaccaatccttttctgatttagtattcatgctttactttgcgaatgcttgtaaataatctagcaccgtttgttattaaagtaacaactgccactgcttttttgaacttacgtggtgacttaattgaaatgtaaaagtctaacacggttcctacagtgcttaaacctagtgaaagatatactaattttttatttttagcatgatatttatagccattgtagccgtcgactatgaaacctgcgacatttagtaaacttgataaacgttgtgatttggaacgttttgccataataataattccccctagtatcttctgtttttatggaaaaattgggtgcgctgaattgctaacgttttgcgctataactactcatatatgataacataattgtacagtataatttgaaaaattgatttcacaaagttggggtgtcaaagatgattaaatgtgtctgtttagttgaagaaacagctgataaaatattgcttgttcaagtaaggaatcgcgaaaagtattatttcccaggtggtaaaatagaggaaggggaatcacaagtacacgcgctgttaagagaagtaaaagaagaattaaatttaacattaacaatggatgaaattgaatatatcgggacaattgtaggccctgcatatccacaacaggatatgttaactgagttaaatggatttcgcgcattaaccaaaatcgattgggaaaatgtaactatcaataatgaaattacggatatacgctggattgataaagataatgatgcgttgattgcgcctgctgtcaaagtttggattgaaacgtatggtgggaaacatgacaaataatgacaccatcatgttacgacattatgtcccacaagatcattcgatgttagaagcttttcaattaagtgaaagtgatttgaagtttgttaaaacgccagaggaaaatattacagctgcaatgtctgataatgaaaggtatcccatcgttgtaatggatggcaggcaatgtgtggccttttttacattacatcgtggaaaaggagtcgcaccatttagcgataaccaaaatgcagtatttttcaggtcatttagtgtggatcaacgttatcgtaataaaggaataggtaaagtagtaatggaaaaattggtgccatttattacttcaacatttcaggatattaatgagattgtgttaacggttaatactgacaatccacatgccatggcactttatcgacaacaaggatatcaatatatgggagatagtatgttcgtcggaagacctgttcatattatggcgctaactataaaataaattaaatttaaaagcatctttactcatcgtcgaccacaacaattaatgatgaataaaggtgctttttgttatagaccaccggacaatttactatagtaaaaagcgacctagtgaacaattgacatatatccacaggtcgcttaacttaagttatattgaaagttgcgattaattgatagactcatcatttttgcgctgtcgagatggtctttttattaaaaatgccgtaatccaagccgtaatcggaatactgattgcaacggcaataccgcctaaaataatagaaataaattcttgggcaaatattttcgagtttataatatgaccaaatgaatatttaagtttgaaaaaccaaataaataaagcaagttggccaccaaaaaaggcaaggtaaatcgtgttcgcagatgtcgctaaaatttctctaccaacacgcatgccagattggaataattcgtattgcgtaagtgttggattcacttgatgcaattcataaatgggtgaactaatggtaatcgttaaatctatcacagctgcaataacagcaagaataatagtgaacaccataaattgaaccatatcaatgccaatattcattgaatacacatatgtttcatcttgttgttcggttgaaaagccttgtagatgaccgaagtagaccgataaataaatgagtgtaatcaacaatattgttgtaacgatagtgctgataaatgcagcttgtgttttaacattgtaactattgagtacgaataaattacaagcgccaataataatgcagaaaaagaatgtgacgacataaatcggtacgccaaaaataatcaatacaatactaataattaaaatggcaaagtttaaaaatagggttaaataagagatgaatccctttttacctccgaaaattatcatcagaaagaggagcaataacgccaatataaatacagcattcattgtttcgccctccttaatgtttcaaatatttccataaacaatattgtgataggaattgtaagtacgatacctataccacctgttagtgcacgcgcaatttctaacgaccaattcatcgaaatagtataagtcactgtattggcattttttaaaaagattaaaaacataggtagtgcaccggataaatacgagaataataaaatgttagtcatggtacccataatatcttggccgatgtttcgaccagcaagtgcccaacgcttcattgaaatgtgcggcgtacgttgtaaaatctcatgcatgccacttgcaatcgtaattgcaacatccataatagcgcctaatgaacctattaacactgaggctaggaagatatctttcggtggtaatgataaaaaattcatcgtttcatatttaatgcctttaccatctgtcatatatatgattaattctgttaaacctatactcaaaaaagttccgataattgtacttgctacggtaatgagtgtacgcatatgccagcctgtaacgagcaataaagtgagtattgttgaacagatcatggcaatggtcatgagtaagaataaattaatattgctatgttgaatatgaatgtaaattgcgattaatatggcaatagaattcaagattaatgataaaatcgattgcagtccgactttgcgaccaaccaataatacagttaataaaaacaaaccagtgatgataaccgttaaggtatcacgcttcttttctataatataagcatcactcggcttgttagaaatatgtaataatactttttcgtgtgtgcgaaatgcttctgaatctgcttgagatttgacgtactgatgattgatcgtcgtcgtttctccagcaaattgaccatttaatattttgacttttaattgatttttatacttaatatcacgattattttgtgcatcttttgtaggtgtcgatgaaacgtgtttgacatctataatttgaccaattggtttgttgtaaaagttctcattattgaatgtaaataaaatagcaccaatgaatgcgatgcagaacaaacctaaaattatattaaatgaatggctttgtaaataaatttctatatttcaaaaacaaaaccccaattctatgaatgaattaatatggtgattatacgcccttaattttttattttcaaagatattactgctaagtgtaaaacgaaaatcatcattgatagcgtcgaaatacttaatggaatgtagacgttttagtcattaattgctgaataagtgttaataatatgccaatatcgctctttgtataaggcgcctttgtaatagcacatatcgttctttttaattcagtatgatctaattttatatctatccatgatttagattctggtaaatgtatattttgtgatgaaatgatgtaaccttctttttgacgaaggagatactgcgcaagtggtaggctactgattgtgtatacatctgatttagtaatcttgcgcaattgtttttttacagtttcggcaaatggtgccaagcaataaatatgactatgctcaaactgaattaatggtgggtgtgtcgccatcgtaattggatcgtctgaaggcgcatataaatgatagtgctcttcgaataaaggtagcatatgtaattgtttgtgtttacgtatttctggagtaagttccgtgaaaccaatgtctatattcccatttaatacgctatttataatcgtgtcatgttctaataaattagggatgacatgtgtatcattttgtaaatgaaatgtttggataagtggtagtaacatgtgggatacgtcactctcatcatagccaatgtagatacttttatttttagttaatccatggctttgaaattgttcaatcgtgctatctaaatgttcaataatacgcagagcttcattaaataataatttcccttcagatgtgagcataatattgcgtccttgctttttaaataaagatacattaagttcttgttctaataatgtaatttgacggcttatcgctgattgagcaatgtttagttcaagtgctgtttcggagatatgttctcttttagcgacctcgataaaatatcttaattgtttaatttccatagcggtataggcacctccgaaaatgagtgttttgtaactattatagcaatattattgatgaatgttctattttttagatgaatatcttctattttatatattgaacagataaattttttagattatagtaattatcattaataactaatatcagaatattctaaaaaaggggtgtgcatcatgcacaatgagaaattaattaaaggcttatatgactatcgtgaggaacatgatgcgtgcggtattggtttttatgcaaatatggataataaaaggtctcatgacatcatagataaatcacttgaaatgttgcgacgcttagaccacaggggcggggtcggcgcagatggcatcactggtgatggcgcaggtatcatgactgaaataccttttgcatttttcaaacaacatgtaacggactttgaaatcccaggtgaaggcgaatatgccgtggggttatttttttccaaagaacgcattttaggttctgaacatgaagcaatttttaaaaagtatttcgaaggcgaagggttatctattcttggttaccgtaatgtaccagttaataaagatgcgattgcgaaacacgtagcagatacgatgccagtcattcaacaagtgtttattgatattagggacattgaagatgttgaaaagcgtttgtttttagcgagaaaacaattagagttctattcgactcagtgcgatttagaattgtattttacgagcttatcacgcaaaacaattgtatataaaggctggttacgatcagaccaaattaaaaaactctatacagatttatcggatgatttatatcaatcaaagctagggttagttcattcgagatttagtacgaatacattcccgagttggaaaagggcgcatcctaaccgtatgttaatgcataatggtgagattaacacgattaaaggtaatgtgaactggatgcgagcacgccaacataaattaatcgaaacattatttggcgaggatcaacataaagtgtttcaaattgtcgatgaggatggtagtgactctgccattgtagataatgcgctagagttcttatcgttagccatggagccagaaaaggcagcgatgttactcatacctgaaccttggttatacaatgaagcgaatgatgcaaatgtacgtgcgttttatgaattttatagttatttaatggaaccgtgggatggtcctacaatgatttcgttctgtaacggtgacaaacttggcgcgcttacagatagaaatggattacgtccaggtcgttatacgattactaaagataactttattgtcttttcatctgaagtgggtgttgtggacgtacctgaaagtaatgttgcttttaaaggtcaattgaatcctggaaagttattgcttgttgattttaaacagaataaagtcattgaaaataatgatttaaaaggtgcgattgctggagaattaccatataaaacatgggttgataatcataaagttgattttgattttgaaaatatacagtatcaagattcacaatggaaagatgaaacgttatttaaattacaacgtcaatttgcatataccaaagaagagattcataagtatattcaggaacttgtagaaggtaagaaggatcctatcggtgcaatgggatatgatgcgccaattgcagtgttgaacgagcgaccagaatcactatttaattactttaaacagctgtttgcacaagtaacaaatccaccaattgatgcgtatcgtgaaaaaatcgtaacgagtgaactttcttatttaggtggcgaaggtaacttattagcacctgacgaaacggttttagatcgaattcaattgaagagaccggtattgaatgaatcacacttagcagcgattgatcaggagcattttaaattaacatatttatcaacggtatatgaagaggatttggaagatgcgttagaagcattaggccgagaagcagtggatgctgtaaagcaaggcgctcaaattctagtgttagatgatagtggattagttgatggcaatggctttgcaatgccgatgttactcgcaataagtcatgtgcatcaattacttattaaagcagatttacgtatgtctacaagtttagtcgctaaatctggtgagacacgagaagtacatcatgttgcttgtttactagcatatggcgcgaatgcaattgtgccatacctagcgcaacgtacagttgaacaactgacattgacagaagggttacaaggcaccgttgtcgataatgttaagacatatacggatgtattgtcggaaggtgtcattaaagtaatggctaagatgggaatttcgacagtgcaaagttatcaaggtgcacaaatatttgaagcgattggcttgtctcatgatgtgattgatcgttattttactggaacacagtctaagttatctggtatttcgattgatcaaatcgatgctgaaaataaagcacgtcaacaaagtgatgataattatcttgcatcaggtagtacattccaatggagacaacaaggtcaacatcatgcttttaatccggaatctattttcttattgcagcacgcatgtaaagaaaatgactatgcgcaatttaaagcatactctgaagcggtaaacaaaaatagaacagatcacattagacatttacttgaatttaaagcatgtacaccgattgacatcgaccaagttgaaccggtaagtgacattgtcaaacgttttaatacaggggcgatgagttatggatcgatttcagcggaagcacatgaaacgttagcacaagccatgaaccaattaggtggaaagagtaatagtggtgaaggtggcgaagatgcaaaacgttatgaagtacaagttgatggaagcaacaaagtaagtgcgattaaacaagttgcttctggacgttttggtgtaactagtgattatttacaacatgccaaagaaattcaaattaaagttgcgcaaggtgcaaagcctggtgaaggtggtcaattacctggtactaaggtatatccgtggattgcgaagacaagagggtcaacgccaggtatcggtctgatttcaccaccgccacatcatgatatttattcaatagaagatttagcgcaactgatacatgatttgaaaaatgcgaataaagatgcagatatcgcggtaaaattagtttcgaaaacaggtgttggtaccattgcatctggggtggcaaaagcatttgcagataaaattgtcatcagtggttacgatggtggtacaggggcttcacctaaaacgagtattcagcatgccggtgttccttgggagattggtttagcagaaacacatcaaacattaaaactaaatgacttaagaagtcgtgttaagttagaaacagacggtaagttattaactggtaaagatgtagcgtacgcatgtgcgcttggagcggaagaatttggatttgcaactgcaccattagtggtgttgggctgtattatgatgcgtgtatgccataaagatacatgtccagtaggagttgcaactcaaaacaaagatttacgtgctttatatagaggtaaagcacatcatgttgttaattttatgcattttattgcacaagaattaagagaaattttagcatctttaggtttgaaacgtgtagaagacttagttggaagaactgatttattacaacgatcatcaacattaaaagcgaatagcaaagcggctagtattgatgttgaaaaactgttatgtcctttcgatgggccaaatacaaaagaaattcaacaaaatcataatcttgagcatggatttgatttaacaaatttatatgaagtaacgaagccatatattgctgaagggcgtcgctatacaggtagctttacagtaaataatgaacaacgtgatgtaggggttattacaggtagtgagatttcgaaacaatatggagaagcaggacttcctgaaaatacaattaatgtttatacgaatggtcatgctggtcaaagtcttgcagcatatgcaccgaaaggcttaatgattcatcatactggagatgcgaatgactatgttggtaaaggattatctggtggtacggtcattgtcaaagcaccttttgaagaacgacaaaatgaaattattgctggtaacgtctcattctatggtgcgacaggtggtaaggcatttattaacggtagtgcaggagaaagattctgtattagaaatagtggtgtagatgttgtcgttgaaggtatcggcgaccatggattagagtacatgactggtggacatgtcattaatttaggtgatgtaggtaagaacttcggtcaaggtatgagtggtggtattgcttacgttatcccgtctgatgtagaagcttttgttgaaaataaccaactagatacgctttcgtttacaaaggttaaacaccaagaagaaaaagcattcattaagcaaatgctggaagaacatgtgtcacatacgaatagtacgagagcgattcatgtgttaaaacattttgatcgtattgaagatgtcgtcgttaaagttattcctaaagattatcaattaatgatgcaaaaaattcatttgcacaaatcattacatgacaatgaagatgaagcgatgttagctgcattttacgatgacagtaaaacaatcgacgctaaacataaaccagccgttgtgtattaaggaaagggggagataagatgggtgaatttaaaggatttatgaagtatgacaaacagtacttaggtgaattatcactggtagaccgtttgaagcatcataaagcatatcaacaacgatttactaaagaagatgcctctatccaaggtgcacgatgtatggattgtggaacgccgttttgtcaaaccggacaacagtatggtagggaaacaataggttgtccaattggaaactacattcctgaatggaacgacttagtgtatcatcaagattttaaaactgcttatgaacgcttaagcgaaacaaataactttcctgactttacagggcgtgtatgtcctgcaccatgcgaaagtgcttgtgtgatgaagattaatagagaatcgattgcgattaaaggtattgaacgcacaattattgatgaagcttttgaaaatggttgggtagcgccgaaagttccgagtcgccgtagagatgaaaaagtggcaatcgttggaagcggtccagcaggattaactgctgctgaagaacttaatctactaggatatcaagtgactatttatgaacgtgctagagaatcaggtggtttattaatgtatggtatacctaatatgaagcttgataaagatgtggttcgacgtcgtattaagttaatggaagaagcgggcattactttcattaatggtgttgaagtaggcgttgatattgataaagcaacgttagaatctgaatacgatgcaattatattatgtactggtgcacaaaaaggtagagatttacctttagaaggacgcatgggtgatggtatacatttcgctatggattatttaactgaacaaacgcagctgttaaatggagaaattgatgatataacaataactgcaaaagataagaatgtcattatcattggtgctggtgatacaggggcagactgtgtagcgacagcattaagagaaaattgcaagtcgattgttcaatttaataaatatacgaaattgccagaagcaattacgtttacagaaaatgcatcatggcctttagcaatgccggtgtttaaaatggactatgcgcaccaagagtacgaagctaagtttggtaaggaaccacgtgcatatggtgttcaaacgatgcgttacgatgttgacgataaaggacacatacgtggtttgtatactcaaattttagagcaaggcgaaaatggtatggtcatgaaagaaggacctgaaagattttggcctgctgaccttgtattattatcaatcggcttcgaaggtacagaaccaacagtaccaaatgcttttaacattaaaacggatagaaatcgaatcgtggcggatgatacaaactatcaaactaataatgaaaaagtatttgctgctggagatgctagacgtggtcaaagtttagttgtatgggcgattaaagaaggtagaggcgtagcgaaagcagtagatcagtatttagcgagtaaagtttgtgtataatctttgtatggaaatggtggttacgttgacgttgaatggtgctgaatcgagtttgaaataatctagtatctatcaacgtcacatgccatctttgtaacctaaaaacaaaggtttgtaagataactaatagattaattataagtagtgattttttacattcgttttataggtcaactgtagtggaagacaatgaattgtggtaatcatgtaatgcttaaaaacaatattgacttttacagaacgttcatatatgataaatattgtgtttaggaggaatacccaagtccggctgaagggatcggtcttgaaaaccgacaggggcttaacggctcgcgggggttcgaatccctcttcctccgccatcaatatttatattaaatactatataaaaaaaggtaagtactcaaagtttgagtgtttaccttttttatttgcctttgaatgactcgtattttttgataatagaaatgataaggcattgagattggaagggcatttggcttgtgcaatatacatagctaagtgccttttttattttgtgaaatatgatagatggcttgtgtgggcaggtttactatttatagatatgcatttttcaatttaggagttggccatgcatctacactttataatggcgagagtgtggtgagttattgttaataacgcaattgtagcgaggagttattgctacatatgtcgttaaggctcattgattttctgaaatggctacaccagatcattgtgacaaaataaaaaaatttgttgaaagcctttacataacttgtctagacaagttatactcgttttaagacattaagggagtgaagtatatggctgtaaaaagagaagatgtaaaagccatcgtaaccgctattgggggaaaagaaaatcttgaagctgcaacgcattgtgtaacacgattacgtttagtgctgaaggatgaaagtaaagttgataaaggcgcattaagtaataatgcgttggtcaaggggcagttcaaagcagaccatcaatatcaaattgtcattggtccaggcacagttgatgaagtgtataagcattttattgaagaaacgggtgctcaagaagcttcgaaagatgaagcgaaacaagccgctgcacaaaaagggaatccagtacaacgtttaatcaaattgttgggggatatttttataccaatattacctgcgattgtgacagctggtttgttaatgggaatcaataatttacttacaatgaaaggtttatttggtccaaaagcacttattgagatgtatccacaaattgctgatatttcaaacatcattaatgtgattgcgagtacggcatttattttcttaccagcattaattggttggagtagtatgcgtgtatttggtggtagtccgattctaggcttagtcttaggtttgattttaatgcacccgcaattagtatctcagtatgatttggcaaaagggaatattccgacgtggaacttatttgggttagagattaagcagttgaattaccaaggtcaagtgttgcctgttttaattgcagcttatgttctagctaaaattgaaaaaggattaaataaagttgttcatgattcgataaaaatgttggtcgttggacccgtagcgcttttagttactggatttttagcatttattatcattggaccagttgcattattgattggtacaggtattacatctggtgttacatttatattccaacatgcaggatggcttggcggagcaatatatggattgttatatgcaccacttgtaattactggcttgcatcatatgtttttagcagtagatttccaattaatgggtagcagcttaggtggtacatacttatggccaatcgttgcgatttcaaatatttgtcaggggtctgcagcatttggcgcatggtttgtctataaacgtcgtaaaatggttaaagaagaaggtttggcattaacatctggtatttctggtatgttaggtgttactgaaccagctatgtttggtgtgaacttacctctgaaatatccatttatcgctgcgatatcaacgtcttgtgtattgggggcaatcgttggtatgaataacgtacttggaaaagttggtgttggtggtgtgccagcattcatttcaattcaaaaagaattttggccagtatatcttattgtgacagctattgctattgttgtaccatgtatactaacaattgtgatgtctcattttagtaaacaaaaagcaaaagaaattgttgtagattaataaaataaaaaaggggcgttcgttattggggcgtcctttattacgttataaggtggtaattgtgtgacgaaagaaatagattggagaaaatccgttgtatatcaaatttatcctaagtcgtttaatgatacgacggggaatggtataggagatatcaacggaattatagaaaaattggattatatcaagttattgggtgttgattatatttggttaacaccagtgtatgaatcaccgatgaatgataatggctatgatatcagcaattatttagaaatcaatgaagactttggaacgatggatgattttgaaaagttaattaaagttgctcatcaaaaagacttgaaagtgatgttagatattgtcattaatcatacgtcgacggagcacgaatggtttaaagaagcccgtaaatctaaagacaacccttatagagattattactttttcagatcatctgaagacggaccgccaacaaattggcattctaaatttggtggtaatgcatggaagtatgattctgagacagatgaatattatttacatttatttgatgtcagtcaagctgatttaaattgggataatccggaagtacgtcaatcgttatatcgaattgtcaatcattggatagacttcggcgttgatggttttcgatttgatgtcattaacttaatttctaaaggtgaatttaaagactctgacaaaataggtaaagaattttatacggatggtcctagagtgcatgagtttctgcatgaattaaatcgtcaaacgtttggtaacactgacataatgactgtaggagaaatgtcttcgacgacgattgaaaattgtattaagtatacacagccagaacgccaagaattgaatagtgtttttaattttcatcatctaaaggttgattatgttgatggtgaaaagtggacgaatgcgaagctggattttcataagttaaaggaaattctgatgcaatggcaacgaggtatttatgacggtggcggatggaacgcgattttctggtgtaatcatgatcagccacgggtagtgtctagatttggtgatgatacgtcggaagagatgaggatacaaagtgctaaaatgttagctatcgcactgcatatgttgcaagggacgccatatatttaccaaggtgaagaaattggtatgacggacccacattttacatcaatagcacaatatcgtgatgttgaatcgattaatgcctaccatcagttgttaagtgaagggcatgctgaagcggatgtgttagcgattttaggacagaagtcacgagacaattcgagaacgcctatgcaatggagtgatgatgttaatgctggatttactgctggtaagccttggattgatattccagaaaattatcatcaggtcaacgttagacaagcacttcagaataaagattctattttctatacgtatcaaaaattaatacaattaagacatacgcatgatattattacgtatggagacattgtgccacgttttatggatcatgatcatttatttgtttatgaacgtcattataagaatcaacaatggctagtaattgcgaatttctcagcatcggctgttgatttgccagaaggattggctagcgaaggtcgtgttgtgattcaaacaggcacagtagaaaataatacgataagcgggtttggtgcaattgtaatcgaaacaaacgcgtaaaataaattgagtggatgcgtttatatggtgaagcaaaagaaatttatgaagatttatgaggcgttgaaagaagatatattaaacgggcagattcaatatggtgaacaaattccgtctgaacatgatttggtgcaattgtaccagtcatctcgagagaccgtgcgtaaggcattagatttgttggcattagacggtatgattcaaaagattcatggtaaagggtcacttgtcatttatcaagaggttacagagttcccattttctgaacttgttagttttaaagaaatgcaagaagaaatgggtgtcgcatatttaactgaagttgttgtgaatgaggttgttgaagcgcatgaagttccagaagttcaacatgctttaaacatcaattctagtgaatcgctcattcatattgttagaactcgtcggcttaaccaacatgtgaagattgttgatgaagattattttctaaagtcgattgtttcagatataggtaatgatgttgcgagtgattctatttatgattatttggaaaaggtattaaatcttaatattagttattcaagtaagtctattacttttgaaccgtttgatgaacaagcatatcaattgtttggtgatgtatcggtggcttattcagcaacagttcgaagtattgtgtatttagaaaatacaatgccgtttcaatataatatttcaaaacatcttgcaaatgaatttaaatttaacgacttctcaagacgtcgtataaagtaaacaatgatataaatgatttatacttgcaattaactattaaaatatagtaatatatatcttgccgtgctaggtggggaggtagcggttccctgtactcgaaatccgctttatgcgaggcttaattcctttgttgaggccgtatttttgcgaagtctgcccaaagcacgtagtgtttgaagatttcggtcctatgcaatatgaacccatgaaccatgtcaggtcctgacggaagcagcattaagtggatcatcatatgtgccgtagggtagccgagatttagctaacgactttggttacgttcgtgaattacgttcgatgcttaggtgcacggttttttatttttaaaaatattaaaccgattattaagagttgaaaatatataattatagaagctactttcttgaagacaattcagcgtattatacgtggaacatgttgtgggaagtagcttttttatatgtgaagtttgattcaagtgaaatcgatgcgcagtttgaatgtttttttacggatataaaaagtaagaagttattatttgatgataaagaaatgatggtgaaatgagggggagtaccttacaatagaattattaatgagatacgttatgattattgacaatcaaatgcctacggaggacatatgcaaatatatttaagtactttaacagagttagattatgataaatctttaaatagtattgaagaaagttttgatgataatcctgaaacgagttggcaagcacgtgcgaaagtgaaacatttaaggaaatctccttgctataattttgaattagaagtaattgcgaaaaatgaaaataacgatgtcgttggacacgttttattaattgaagtagaaattaatagtgatgataagacgtattatggtttggcgattgcttctttatcagtcaaccctgaattgcgtggacaaaaattaggtcgtggattggttcaagcagtagaagagcgtgcaaaagcgcaagaatatagtacggttgttgtagaccattgttttgactactttgaaaagttgggttatgaaaatgctgctgagcatgacattaaattagaatctggtgatgcaccgttacttgtaaaatatttatgggataatttgacggatgcaccacacggaatcgtaaaatttccagaacatttttattaattgttcatttaagaagtaaaggtattatcatgttataatgaaaggtaattgtttatggaggtgctaacttgaattatcaagccttatatcgtatgtacagaccccaaagtttcgaggatgtcgtcggacaagaacatgtcacgaagacattacgcaatgcgatttcgaaagaaaaacaatcgcatgcatatatttttagtggtccgagaggtacgggaaaaacgagtattgccaaagtatttgctaaagcaatcaactgtttaaatagcactgatggagaaccttgtaatgaatgtcatatttgtaaaggcattacgcaggggactaattcagatgtgatagaaattgatgctgctagtaataatggcgttgatgaaataagaaatattagagacaaagttaaatatgcaccaagtgaatcgaaatataaagtttatattatagatgaggtgcacatgctaacaacaggtgcttttaatgcccttttaaagacgttagaagaacctccagcacacgctatttttatattggcaacgacagaaccacataaaatccctccaacaatcatatctagggcacaacgttttgattttaaagcaataagtttagatcaaattgttgaacgtttaaaatttgtagcagatgcacaacaaattgaatacgaagaagaggcattggcgtttattgcgaaagcatctgaaggtggtatgcgtgatgcgttaagtattatggatcaggctattgctttcggcgatggcacattgacattacaagatgccctaaatgttacgggtagcgttcatgatgaagcgttgaatcacttgtttgatgatattgtacaaggtgacgtacaagcatcttttaaaaaataccatcagtttataacagaaggtaaagaagtgaatcgcctaataaatgatatgatttattttgtcagagatacgattatgaataaaacatctgagaaagatactgagtatcgagcactgatgaacttagaattagatatgttatatcaaatgattgatcttattaatgatacattagtgtcgattcgttttagtgtgaatcaaaacgttcattttgaagtgttgttagtaaaattagctgagcagattaagggtcaaccacaagtgattgcgaatgtagctgaaccagcacaaattgcttcatcgccaaacacagacgtattgttgcaacgcatggaacagttagaacaagaacttaagacgcttaaagctcaaggagtgagtgtcgctcctactcaaaattcttcgaaaaagcctgcgagaggtatacaaaaatctaaaaatgcattttcgatgcaacaaattgccaaagtgctcgataaagcgaataaggcggatatcaaattgttgaaagatcattggcaagaagtgattgatcatgccaaaaataatgataaaaaatcactcgttagtttattgcaaaattcggaacctgtggcggcaagtgaagatcacgtacttgtgaaatttgaggaagagatccattgtgaaatcgtcaataaagacgacgagaaacgtagtagtatagaaagtgttgtatgtaatatcgttaataaaaacgttaaagttgttggtgtaccatcagatcaatggcaaagagttcgaacggagtatttacaaaatcgtaaaaacgaaggcgatgatatgccaaagcaacaagcgcaacaaacagatattgctcaaaaagcaaaagatcttttcggtgaagaaactgtacatgtgatagatgaagagtgatacatgacaagcgatataatcgtatgtataatgaaagaaacatcattttattgataaatatttattgattttcaaggaggaaatggaatatgcgcggtggcggaaacatgcaacaaatgatgaaacaaatgcaaaaaatgcaaaagaaaatggctcaagaacaagaaaaacttaaagaagagcgtattgtaggaacagctggcggtggcatggttgcagttactgtaactggtcataaagaagttgtcgacgttgaaatcaaagaagaagctgtagacccagatgatattgaaatgctacaagacttagtgttagcagctactaatgaagcgatgaataaagctgatgagcttactcaagaacgtttaggtaaacatactcaaggcttaaacatccctggaatgtgatcatagatgcattatccagaacctatatcaaagcttattgatagctttatgaaattgccaggcattggtccaaagacagcccaacgtctggcttttcataccttagatatgaaagaagacgatgttgttcagtttgccaaagcattagtagatgttaaaagagaattaacatattgtagcgtatgtggtcacattactgaaaatgatccatgttatatttgtgaagataagcaaagagatcgttcagttatttgtgttgtggaagatgacaaagatgtcatagctatggaaaaaatgagagaatacaaaggtttatatcacgttttacatgggtctatttcgcctatggatggaattggaccagaagatattaatattccttcattgattgaacgcttgaaaaacgatgaagttagcgaattaatcttagctatgaacccgaacttagagggggaatctacagccatgtatatttctagattagttaagcctataggtatcaaagtgacgagattagcacaagggttatcggtaggtggcgatttagagtatgctgacgaagtaacattatctaaagcaatcgcaggtagaacagaaatgtaatgtcttctattaaacatttttgaatttaatactatagtaagaaaagtcacagtgtaatcattgtggctttttttatggtgtgatgtactactttatttgtggtgtggcggtggcatggtttacttctttttactgaggggggatatttaggaagcaagccgtttgttgtgatttgttacttttaatagtaatgattcgaattggattatcgaagtaggaataccgttgtggtgtgttcgtgctattaatttgataaatgcggttgatagttaatgactatgcaaatgaaattcttttgtaattgaaatgatagatgctggcttagtagttgtatttctttggtctaaagcttattaaatcagcctgtacagcggtgttttgagagattatttaaaacttgtaaatttatttttaatttctggtaaaaaaataatgttctgttttgcggtttttttattatcttttcataaaaataaccaccttatttgttttagaaaacgtactattaacaattgtaatttctttaagttcgatttttagaatgagagcgttcagaatggatagtaaaggtgtaatttttactgttgttaagcagtttgaaagcctgtatagtatttatttgttgaggcaaacaaaacaactcaacttaagaaataacttgaattactaacgaaaattaatttcaaaaagttgttgacttaaatgttaataaaatgtataattaattcttgtcggtaagaaaaatgaacattgaaaactgaatgacaatatgtcaacgttaattccaaaaacgtaactataagttacaaacattatttagtatttatgagctaatcaaacatcataatttttatggagagtttgatcctggctcaggatgaacgctggcggcgtgcctaatacatgcaagtcgagcgaacggacgagaagcttgcttctctgatgttagcggcggacgggtgagtaacacgtggataacctacctataagactgggataacttcgggaaaccggagctaataccggataatattttgaaccgcatggttcaaaagtgaaagacggtcttgctgtcacttatagatggatccgcgctgcattagctagttggtaaggtaacggcttaccaaggcaacgatgcatagccgacctgagagggtgatcggccacactggaactgagacacggtccagactcctacgggaggcagcagtagggaatcttccgcaatgggcgaaagcctgacggagcaacgccgcgtgagtgatgaaggtcttcggatcgtaaaactctgttattagggaagaacatatgtgtaagtaactgtgcacatcttgacggtacctaatcagaaagccacggctaactacgtgccagcagccgcggtaatacgtaggtggcaagcgttatccggaattattgggcgtaaagcgcgcgtaggcggttttttaagtctgatgtgaaagcccacggctcaaccgtggagggtcattggaaactggaaaacttgagtgcagaagaggaaagtggaattccatgtgtagcggtgaaatgcgcagagatatggaggaacaccagtggcgaaggcgactttctggtctgtaactgacgctgatgtgcgaaagcgtggggatcaaacaggattagataccctggtagtccacgccgtaaacgatgagtgctaagtgttagggggtttccgccccttagtgctgcagctaacgcattaagcactccgcctggggagtacgaccgcaaggttgaaactcaaaggaattgacggggacccgcacaagcggtggagcatgtggtttaattcgaagcaacgcgaagaaccttaccaaatcttgacatcctttgacaactctagagatagagccttccccttcgggggacaaagtgacaggtggtgcatggttgtcgtcagctcgtgtcgtgagatgttgggttaagtcccgcaacgagcgcaacccttaagcttagttgccatcattaagttgggcactctaagttgactgccggtgacaaaccggaggaaggtggggatgacgtcaaatcatcatgccccttatgatttgggctacacacgtgctacaatggacaatacaaagggcagcgaaaccgcgaggtcaagcaaatcccataaagttgttctcagttcggattgtagtctgcaactcgactacatgaagctggaatcgctagtaatcgtagatcagcatgctacggtgaatacgttcccgggtcttgtacacaccgcccgtcacaccacgagagtttgtaacacccgaagccggtggagtaaccttttaggagctagccgtcgaaggtgggacaaatgattggggtgaagtcgtaacaaggtagccgtatcggaaggtgcggctggatcacctcctttctaaggatatattcggaacatcttcttcagaagatgcggaataacgtgacatattgtattcagttttgaatgtttatttaacattcaaatattttttggttaaagcgatattgcttatgcgagcgcttgacaatctattctttttaaagaaagcggttgtcagacaatgcattaagaaaaattaaagcggagtttacttttgtaaatgagcatttgattttttgaaaacaaagcagtatgcgagcgcttgactaaaaagaaattgtacattgaaaactagataagtaagtaaaatatagattttaccaagcaaaaccgagtgaataaagagttttaaataagcttgaattcataagaaataatcgctagtgttcgaaagaacactcacaagattaataacgcgtttaaatctttttataaaagaacgtaacttcatgttaacgtttgacttataaaaatggtggaaacatagattaagttattaagggcgcacggtggatgccttggcactagaagccgatgaaggacgttactaacgacgatatgctttggggagctgtaagtaagctttgatccagagatttccgaatggggaaacccagcatgagttatgtcatgttatcgatatgtgaatacatagcatatcagaaggcacacccggagaactgaaacatcttagtacccggaggaagagaaagaaaattcgattcccttagtagcggcgagcgaaacgggaagagcccaaaccaacaagcttgcttgttggggttgtaggacactctatacggagttacaaaggacgacattagacgaatcatctggaaagatgaatcaaagaaggtaataatcctgtagtcgaaaatgttgtctctcttgagtggatcctgagtacgacggagcacgtgaaattccgtcggaatctgggaggaccatctcctaaggctaaatactctctagtgaccgatagtgaaccagtaccgtgagggaaaggtgaaaagcaccccggaaggggagtgaaatagaacctgaaaccgtgtgcttacaagtagtcagagcccgttaatgggtgatggcgtgccttttgtagaatgaaccggcgagttacgatttgatgcaaggttaagcagtaaatgtggagccgtagcgaaagcgagtctgaatagggcgtttagtatttggtcgtagacccgaaaccaggtgatctacccttggtcaggttgaagttcaggtaacactgaatggaggaccgaaccgacttacgttgaaaagtgagcggatgaactgagggtagcggagaaattccaatcgaacctggagatagctggttctctccgaaatagctttagggctagcctcaagtgatgattattggaggtagagcactgtttggacgaggggcccctctcgggttaccgaattcagacaaactccgaatgccaattaatttaacttgggagtcagaacatgggtgataaggtccgtgttcgaaagggaaacagcccagaccaccagctaaggtcccaaaatatatgttaagtggaaaaggatgtggcgttgcccagacaactaggatgttggcttagaagcagccatcatttaaagagtgcgtaatagctcactagtcgagtgacactgcgccgaaaatgtaccggggctaaacatattaccgaagctgtggattgtcctttggacaatggtaggagagcgttctaagggcgttgaagcatgatcgtaaggacatgtggagcgcttagaagtgagaatgccggtgtgagtagcgaaagacgggtgagaatcccgtccaccgattgactaaggtttccagaggaaggctcgtccgctctgggttagtcgggtcctaagctgaggccgacaggcgtaggcgatggataacaggttgatattcctgtaccacctataatcgttttaatcgatggggggacgcagtaggataggcgaagcgtgcgattggattgcacgtctaagcagtaaggctgagtattaggcaaatccggtactcgttaaggctgagctgtgatggggagaagacattgtgtcttcgagtcgttgatttcacactgccgagaaaagcctctagatagaaaataggtgcccgtaccgcaaaccgacacaggtagtcaagatgagaattctaaggtgagcgagcgaactctcgttaaggaactcggcaaaatgaccccgtaacttcgggagaaggggtgctctttagggttaacgcccagaagagccgcagtgaataggcccaagcgactgtttatcaaaaacacaggtctctgctaaaccgtaaggtgatgtataggggctgacgcctgcccggtgctggaaggttaagaggagtggttagcttctgcgaagctacgaatcgaagccccagtaaacggcggccgtaactataacggtcctaaggtagcgaaattccttgtcgggtaagttccgacccgcacgaaaggcgtaacgatttgggcactgtctcaacgagagactcggtgaaatcatagtacctgtgaagatgcaggttacccgcgacaggacggaaagaccccgtggagctttactgtagcctgatattgaaattcggcacagcttgtacaggataggtaggagcctttgaaacgtgagcgctagcttacgtggaggcgctggtgggatactaccctagctgtgttggctttctaacccgcaccacttatcgtggtgggagacagtgtcaggcgggcagtttgactggggcggtcgcctcctaaaaggtaacggaggcgctcaaaggttccctcagaatggttggaaatcattcatagagtgtaaaggcataagggagcttgactgcgagacctacaagtcgagcagggtcgaaagacggacttagtgatccggtggttccgcatggaagggccatcgctcaacggataaaagctaccccggggataacaggcttatctcccccaagagttcacatcgacggggaggtttggcacctcgatgtcggctcatcgcatcctggggctgtagtcggtcccaagggttgggctgttcgcccattaaagcggtacgcgagctgggttcagaacgtcgtgagacagttcggtccctatccgtcgtgggcgtaggaaatttgagaggagctgtccttagtacgagaggaccgggatggacatacctctggtgtaccagttgtcgtgccaacggcatagctgggtagctatgtgtggacgggataagtgctgaaagcatctaagcatgaagcccccctcaagatgagatttcccaacttcggttataagatccctcaaagatgatgaggttaataggttcgaggtggaagtatggtgacatgtggagctgacgaatactaatcgatcgaagacttaatcaaatttaaatgttttgcgaagcaaaatcacttttacttactatctagttttgaatgtataatctacattcatatgtctggtgactatagcaaggaggtcacacctgttcccatgccgaacacagaagttaagctccttagcgtcgatggtagtcgaacttacgttccgctagagtagaacgttgccaggcaagaaatggatgcgatgagccgcattgagaccgcaaggtctctttttttatgtctaaaacgtcaaaataaaagttaacacaaagaaaaatggcttggcgaagtgaaaacgtttgaatctgacgaaacaagaaaagagcgtaacgagtttagtagagctaaatgagtaagcgagagccgaagaagaggaaagaagcaagcgattgtcacaagacaagaaaggttcttagcgacgatggtagtcgaacttacgttccgctagagtagaacgttgccaggcaagaaatggatgcgatgagccgcattgagaccgcaaggtctctttttttatgtctaaagtagcaaagtaaaaaagtaaagacaaagaaagatggcttggcgaagtgaaaacgtttgaatctgacgaaacgagaaaagagcgcaacgagtttagtagagctaaatgagtaagcgagagccgaagaagaggaaagaagcaagcgattgtcacaagtcaagaaaggtctttagcgtcgatggtagtcgaacttacgttccgctagagtagaacgttgccaggcaagaaatggatgcgatgagccgcattgagaccgcaaggtctctttttttatgtctaaaacgtcaaaataaaagttaacacaaagaaaaatggcttggcgaagtgaaaacgtttgaatctgacgaaacaagaaaagagcgtaacgagtttagtagagctaaatgagtaagcgagagccgaagaagaggaaagaagcaagcgattgtcacaagacaagaaaggttcttagcgacgatggtagccaacttacgttccgctagagtagaacgttgccaggcaagaaaatggatgcgatgagccgcattgagttttggaaatgataatttaataatgtgcacttttgattgtttaaatctgtgactagaagtataagtgaagacattcagaagtattataaaaagtgaacagcagtaagatagtttttaatcataaatcatcttactgctgtttttaggttttatgtttaatatcttttaaatcgaaatacaaaagggaaattaattattatacaatagacaagctattgcataagtaacactaacttttgtcaaagaagtgttactatataattaatacttttgaaagtaactaattccaaaacattgtaaataaaggaagcgtatatcatgaagcaacctattttaaataaattagaaagtttaaatcaagaagaagcgatttctttgcatgttccgggtcataaaaatatgactatcggtcatttatctcaattatcaatgacaatggataaaactgaaatacctggattagatgatttacatcatcctgaagaagtcattttagaaagtatgaagcaggtggagaaacattcagattatgatgcttatttcttagtgaatggcaccacttcaggaatattatctgtcatacagtctttttcacagaaaaaaggcgatatattaatggcaagaaatgtacataaatctgtattacatgcgctcgatattagccaacaagaagggcattttattgaaacgcatcaaagtccgttaacgaatcattacaataaagttaatttaagtagtttgaataatgacggtcacaaacttgctgtgttgacttatcctaactattacggtgaaacatttaatgtagaagaggttatcaaatctttgcaccaattaaatatccctgtactcattgacgaagcacacggcgcgcactttggattgcaaggatttccagattctacattaaattatcaagctgactatgttgttcaatcttttcataaaacgttacctgctttaacgatgggctcggtactttatattcataaaaatgcaccttatagagaaaatattatagaatatctaagctacttccaaacatctagtccttcgtatttgattatggctagtttagagtcagctgcccagttctataaaacatatgatagttccgtgttttttgataagagagcgcaattaatcgaatgtttggagaagaagggttttgaaatgattcaagttgatgatccgttgaagttgttgataaaatatgaaggctttacaggtcatgatattcaaaattggtttatgaatgcacatatctatttagaattagcggacgactatcaagcattagcgatattaccgttatggcatcatgatgatacgtatttatttgattcgcttttacgtaaaattgaagatatgattttaccgaaaaaatcagtttctaaagttaaacaaacacaacttttaacaactgaaggtaactataaaccaaaacgctttgaatatgttacttggtgtgatttgaaaaaggcaaaaggtaaagttctggcgcgacatattgtcccgtatccgccagggattcctattattttcaaaggagaaacaataactgaaaatatgatagaattggtaaatgaatatctggaaactggaatgatagttgaaggaattaaaaataataaaattttagttgaggatgaataaaatgtcagcttttataacttttgagggcccagaaggctcaggtaaaacaactgtaattaatgaagtttatcatagattagtaaaagattatgatgtcattatgacaagagaaccgggcggcgttcctactggtgaagaaatacgtaaaattgtattagaaggcaatgatatggacattagaactgaagcaatgttatttgctgcatctagaagagaacatcttgtattaaaggtcataccagctttaaaagaaggtaagattgtgttgtgtgatcgctatatcgatagttcattagcttatcaaggttatgctagagggattggcgttgaagaagtaagagcattaaatgaatttgcaataaatggattatatccagatttgacgatttatttaaatgttagtgctgaagtaggtcgcgaacgtattattaaaaattcaagagatcaaaatagattagatcaagaagatttaaagtttcacgaaaaagtaattgaaggttaccaagaaatcattcataatgaatcacaacggttcaaaagcgttaatgcagatcaacctcttgaaaatgttgttgaagacacgtatcaaactatcatcaaatatttagaaaagatatgatataattgttagaagaggtgttataaaatgaaaatgattatagcgatcgtacaagatcaagatagtcaggaacttgcagatcaacttgttaaaaataactttagagcaacaaaattggcaacaacaggtgggtttttaagagcaggtaatacaacattcttatgtggtgtcaatgatgaccgtgtagatgaaatattgtctgtgattaatcaaacgtgtggtaatagagaacagttggtttcacctattacacctatgggaggcagtgcggattcgtacattccatatccagttgaagttgaagttggcggtgctactgtatttgttatgccagttgatgcattccatcaattttaattctataatacaatcatcaattagagatacttaaaatagtgtattaataagttattaacaattttgggttgcttgactgcgactagttcagatgccaatagatttgatttttgtggttctaagaataatcacaaatcatggtcgctattgttgcagtaattagttgctctttggcaacctttttatataaaagcaaaagggagtttgtaatgaatggatgaacagcaacaattgacgaatgcatatcattcaaataaattatcgcatgcctatttatttgaaggtgatgatgcacaaacgatgaaacaagttgcgattaattttgcaaagcttattttatgtcaaacagatagtcaatgtgaaacaaaggttagtacatataatcatccagactttatgtatatatcaacaactgagaatgcaattaagaaagaacaagttgaacaacttgtgcgtcatatgaatcaacttcctatagaaagcacaaataaagtgtacatcattgaagactttgaaaagttaactgttcaaggggaaaacagtatcttgaaatttcttgaagaaccaccggacaatacgattgctattttattgtctacaaaacctgagcaaattttagacacaatccattcaaggtgtcagcatgtatatttcaagccaattgataaagaaaagtttataaatagattagttgaacaagacatgtctaagccagtagctgaaatgattagtacttatactacgcaaatagataatgcaatggctttaaatgaagaatttgatttattagcattaaggaaatcagttatacgttggtgtgaattgttgcttactaataagccaatggcacttataggtattattgatttattgaaacaggctaaaaataaaaaactgcaatctttaactattgcagctgtgaatggtttcttcgaagatatcatacatacaaaggtaaatgtagaggataaacaaatatatagtgatttaaaaaatgatattgatcaatatgcgcaaaagttgtcgtttaatcaattaattttgatgtttgatcaactgacggaagcacataagaaattgaatcaaaatgtaaatccaacgcttgtatttgaacaaatcgtaattaagggtgtgagttagatgccaaatgtaataggtgttcagtttcaaaaagcgggaaaattagaatattatacacctaatgatatacaagtagatatagatgactgggtagttgtcgaatctaaaagaggcatagagataggtattgttaaaaatccattaatggatattgctgaagaggatgttgtgttaccacttaaaaatattattcgcattgctgatgacaaagatattgataaatttaattgtaatgaacgagatgctgaaaatgcattaatactatgtaaagacattgtaagagaacaaggtttggacatgcgtttagtcaattgcgaatatacattagataaatcgaaagttatttttaattttacggcagatgatcgtattgattttagaaaattagtaaaaatattagcgcaacatttaaaaacacgtatcgagttgagacaaattggtgtaagggatgaagccaaattgcttggcggtatcggaccttgtggtaggtcgttatgttgttctacatttttaggtgattttgaaccagtatcgattaagatggctaaggatcaaaatttatcattaaatccaactaaaatttccggtgcatgtggtcgtttgatgtgttgtttaaaatatgaaaatgactactatgaggaagtacgtgcacaattacctgatatcggtgaagcaattgaaacgcctgatggtaacgggaaagtagttgctttaaatatattagacatttctatgcaggtgaagcttgagggacatgaacagccacttgaatataaattagaagaaatagaaactatgcattaaggaggcattattacatttggatcgcaatgaaatatttgaaaaaataatgcgtttagaaatgaatgtcaatcaactttcaaaggaaacttcagaattaaaggcacttgcagttgaattagtagaagaaaatgtagcgcttcaacttgaaaatgataatttgaaaaaagtattgggcaatgatgaatcaactactattgatactgtgaattcaaaaccagcaaaagctgtgaaaaagccattaccaagtaaagataatttggctatattgtatggagaaggatttcatatttgtaaaggcgaattatttggaaaacatcgacatggtgaagattgtctgttctgtttagaagttttaagtgattaatcaagcacactcaaatagtgttataattataaatgaatatggtttggataagtctgagacaatgtatgtttcaggctttaattgtgtataaagttttggtgattgcattagagatagtggtactaaatgttattattaagtgtgcacgcagtatcattagttgtaaaatgtagctgttaaaattcaaaaatacatcgaatgtagataggcatttaatataaaaagagatttcaattactcaatagaaaaaggttgtcttcataggagttaaaaatgttaaaagagaatgaacgatttgatcaactaatcaaagaagattttagtattattcaaaatgatgatgttttttcgttttcaacggatgctttgttgttagggcattttacaaaacctagaacaaaagatattgtgttggacttatgttcaggcaatggggtgatacccttgttattgtttgcgaaacatccacgacatatagaaggtgttgagattcaaaaaacacttgtcgatatggcgcgacgcacatttcaattcaatgatgttgatgaatatttaacaatgcatcacatggatttgaaaaacgttactaaagtatttaaaccttcacaatatactttagtaacgtgtaatccgccttattttaaagagaatcagcaacaccaacatcaaaaagaagcacataagatagcgagacatgagattatgtgtacacttgaagattgcatgattgcagctcgtcatttattaaaagaaggtggcaggctaaatatggtacatcgtgcagatagactaatggatgtcttgtttgaaatgagaaaagcgaatattgaacctaagaaagtcgtttttatttatagtaaagtagggaaatcagcacaaacgatagttgtagaaggtcgaaaaggtggaaatcaaggtttagaaatcatgcccccattttatatttataatgaagatggtaattatagcgaagaaatgaaggaagtatattatggatagtcattttgtatatattgtaaaatgtagtgatggaagtttatatacaggatacgctaaagacgttaatgcacgtgttgaaaaacataatcgaggtcaaggagccaaatatacgaaagtaagacgtccggtgcatttagtttatcaagaaatgtatgagacaaagtctgaagcattgaagcgtgaatatgaaattaaaacttataccagacaaaagaaattgcgattaattaaggagcgatagtatggctgtattatatttagtgggcacaccaattggtaatttagcagatattacttatagagcagttgatgtattgaaacgtgttgatatgattgcttgtgaagacactagagtaactagtaagctgtgtaatcattatgatattccaactccattaaagtcatatcacgaacataacaaggataagcagactgcttttatcattgaacagttagaattaggtcttgacgttgcgctcgtatctgatgctggattgcccttaattagtgatcctggatacgaattagtagtggcagccagagaagctaatattaaagtagagactgtgcctggacctaatgctgggttgacggctttgatggctagtggattaccttcatatgtatatacatttttaggatttttgccacgaaaagagaaagaaaaaagtgctgtattagagcaacgtatgcatgaaaatagcacattaattatatacgaatcaccgcatcgtgtgacagatacattaaaaacaattgcaaagatagatgcaacacgactagtatcactagggcgtgaattgactaagaagttcgaacaaattgtaactgatgatgtaacacaattacaagcattgattcagcaaggcgatgtaccattgaaaggcgaattcgttatcttgattgagggtgctaaagcgaacaatgagatatcgtggtttgatgatttatctatcaatgagcatgttgatcattatattcaaacttcacagatgaaaccaaaacaagctattaaaaaagttgctgaagaacgacaacttaaaacgaatgaagtatataatatttatcatcaaataagttaatcactttatcgattaaatgaaattttaaacgattttataaatgcaagctgtaattttaaatggtaagttatcattttgcattgatactgataaaatgatgttgactatgataaaaaaatgatgacatcgacgttttttaatgtaaaataaatacattgaaagtaataaataccttaacattgaataagatgaaaatgagatgacgagataaatgttcgcgtccgttgaaatgcatagaaatcttagatattatttgaagtgagacattacgaggaggaacagttatggctaaagaaacattttatataacaaccccaatatactatcctagtgggaatttacatataggacatgcatattctacagtggctggagatgttattgcaagatataagagaatgcaaggatatgatgttcgttatttgactggaacggatgaacacggtcaaaaaattcaagaaaaagctcaaaaagctggtaagacagaaattgaatatttggatgagatgattgctggaattaaacaattgtgggctaagcttgaaatttcaaatgatgattttatcagaacaactaaagaacgtcataaacatgtcgttgagcaagtgtttgaacgtttattaaagcaaggtgatatctatttaggtgaatatgaaggttggtattctgttccggatgaaacatactatacagagtcacaattagtagacccacaatacgaaaacggtaaaattattggtggtaaaagtccagattctggacacgaagttgaactagttaaagaagaaagttatttctttaatattagtaaatatacagaccgtctattagaattctatgaccaaaacccagattttatacaaccaccatcaagaaaaaatgaaatgattaacaacttcattaaaccaggacttgctgatttggctgtttctcgtacatcatttaactggggtgtccatgttccgtctaatccaaaacatgttgtttatgtttggattgatgcgttagttaactatatttcagcattaggctatttatcagatgatgagtcactatttaacaaatactggccagcagatattcatttaatggctaaggaaattgtgcgattccactcaattatttggcctattttattgatggcattagacttaccgttacctaaaaaagtctttgcacatggttggattttgatgaaagatggaaaaatgagtaaatctaaaggtaatgtcgtagaccctaatattttaattgatcgctatggtttagatgccacacgttattatctaatgcgtgaattaccatttggttcagatggcgtatttacacctgaagcatttgttgagcgtacaaatttcgatctagcaaatgacttaggcaacttagtaaaccgtacgatttctatgattaataagtactttgatggcgaattaccagcgtatcaaggcccacttcatgaattagatgaagaaatggaagctatggctttagaaacagtgaaaagctatactgaaagtatggaaagcttgcaattttctgtggcattatctacggtatggaagtttattagtagaacgaataagtatattgacgaaacaacgccttgggtattagctaaggacgatagccaaaaagatatgttaggcaatgttatggctcacttagttgaaaatattcgttatgcagctgtattattacgtccattcttaactcatgcgccgaaagagatttttgaacaattgaacattaacaatcctcaatttatggaatttagtagtttagagcaatatggtgtgcttactgagccaattatggttactgggcaacctaaacctattttcccaagattggatagcgaagcggaaattgcatatatcaaagaatcaatgcaaccgcctgctactgaagaggaaaaagaagagattcctagcaaacctcaaattgatattaaagactttgataaagttgaaattaaggcagcaacgattattgatgctgaacatgttaagaagtcagataagcttttaaaaattcaagtagacttagattctgaacaaagacaaattgtatcaggaattgccaaattctatacaccagatgatattattggtaaaaaagtagcagttgttactaacttgaaaccagctaaattaatgggacaaaaatctgaaggtatgatattatctgctgaaaaagatggtgtattaaccttagtaagtttaccaagtgcaattccaaatggtgcagtgattaaataactgtatttttaaaaattaggagagataattatgttaatcgatacacatgtccatttaaatgatgagcaatacgatgatgatttgagtgaagtgattacacgtgctagagaagcaggtgttgatcgtatgtttgtagttggttttaacaaatcgacaattgaacgcgcgatgaaattaatcgatgaatatgattttttatatggcattatcggttggcatccagttgacgcaattgattttacagaagaacacttggaatggattgaatctttagctcagcatccaaaagtgattggtattggtgaaatgggattagattatcactgggataaatctcctgcagatgttcaaaaggaagtttttagaaagcaaattgctttagctaagcgtttgaagttaccaattatcattcataaccgtgaagcaacacaagactgtatcgatatcttattggaggagcatgctgaagaggtaggcgggattatgcatagctttagtggttcttcagaaattgcagatattgtaactaataagctgaatttttatatttcattaggtggaccagtgacatttaaaaatgctaaacagcctaaagaagttgctaagcatgtgtcaatggagcgattgctagttgaaaccgatgcaccgtatctttcgccacatccgtatagaggaaagcgaaatgaaccggcgagagtaattttagtagctgaacaaattgctgaattaaaaggcttatcttatgaagaagtgtgcgaacaaacaactaaaaatgcagagaaattgtttaatttaaattcataaagttaaaagtgagaaagatcaccgccataaatataaacgatgctatattcgtttaatatgctatggttctttctcacttttttaaattaaaatatcgtgtatgtgcaatacgtgcgatagagatggttagtgctttgaaattaagaattgtaggaaggcgttttaaatgaaaatcaatgagtttatagttgtagaaggacgagatgatactgagcgtgttaaacgagctgttgaatgtgatacgattgaaacgaatggtagtgccatcaatgaacaaactttagaagtaattagaaatgctcaacaaagtcgaggcgttattgtattaacagatccagatttcccaggagataaaattagaagtacaattactgaacatgtcaaaggtgttaaacatgcgtatattgatagagaaaaagctaaaaataaaaaagggaaaatcggtgttgaacatgccgacttaattgatattaaagaagcgttactgcatgttagttcaccctttgatgaagcttatgaatcaattgataaatctgtgcttatagagttggggttaatcgttgggaaagatgcaaggcgccgtagagaaattttaagtagaaaattgcgaatcggccattcgaatggtaagcagttattgaaaaagttaaatgcatttggttataccgaagcggatgtaaggcaagctttagaagatgaatgaggaagtgaaaatgttggataataaagatattgcaacaccatcaagaacgcgagcgttgttagataaatatggctttaattttaaaaaaagtttaggacagaactttttgatagatgtgaatatcattaataatatcattgatgcaagtgatattgatgcacaaactggggtgattgaaattggtccaggtatggggtcgttgacagaacaattggccagacatgctaaaagagtattggcatttgaaattgatcaacgtttaatacctgtattaaatgatacactatcaccttatgataatgtaacggtgattaatgaagatattttaaaagcgaatattaaagaagctgttgaaaatcatttacaagattgtgaaaaaataatggttgttgcaaacctgccgtactatattacgacgccaattttattaaatttaatgcaacaagacataccgattgatggctacgtagtaatgatgcaaaaagaagtgggcgaacgcttaaatgctgaagtaggttcaaaagcatatggttcattatcaattgtcgtacaatactatacagagactagtaaagtattaacggtacctaaatctgtatttatgccaccacctaatgttgattcaatagttgtaaaactgatgcagagaactgaaccgttagtaacagtagataacgaggaagcattttttaagttagcaaaagcagcatttgcacaaagaagaaagacaattaacaataactatcaaaattattttaaagatggtaaacaacacaaagaagtaattttacaatggttggaacaagcgggtattgatccaagacgtcgcggtgaaacgctatctattcaagattttgctaaattgtatgaagaaaagaaaaaattccctcaattagaaaattaaatgattgacaaagcaaagcactattgttaaaatttaaattttgtttgacgaaaacgctgcaaatatggtattatgtaacttgtagcgaggtggagcaatatgccaaaatcaattttggacatcaaaaattctattgattgtcatgtaggaaatcgtattgtactgaaagccaatggaggccgtaagaaaacaataaaacgttctggaattttaaaagaaacatatccgtcagttttcattgttgagttagatcaagacaaacacaactttgagagagtatcttatacatacactgatgtgttaactgaaaatgttcaagtttcatttgaagaggataatcatcacgaatcaattgcacactaaataagacatatagagatgttagacgtttctcagtataagaagtaaatattatgataattatttgagtgttgggcattatgttcaatactctttttatttacaaaatgtttaacactgatgtttcgcttatagatttttcagtaaatggataattgtatttataaacacaaatacaagtaaatactaagtaattagatggagaaaattacttttttattaaaaaaacactaaaaaacaaattaaaatgtcaaatattaattctctttatgttaaaatcatcatattaagataacgaaaagagggcggaaaatgatatatgaaacggcaccagccaaaattaattttacgctcgatacactttttaaaagaaatgatggctatcatgagattgaaatgataatgacaacagttgatttaaatgatcgtttaactttccataaaagaaaagatcgaaagatagttgttgagattgaacataattatgtgccttctaatcataaaaatctcgcatatcgtgcagcgcaactatttattgagcaatatcaactaaagcaaggtgtaacaatttctatcgataaagaaatacctgtttctgctggattagctggaggttcggctgatgcagcagcaacgttgagaggattgaatcgactttttaatataggggcgagtttggaagaattggctctactaggcagtaaaatcgggacagatattccgttttgtatttataataaaactgcactatgtactggaagaggagagaaaatcgagtttttaaataaaccaccttcagcttgggtgattcttgctaaaccaaacttaggcatatcatcaccagatatatttaagttgattaatttagataagcgttacgacgtacatacgaaaatgtgttatgaggccttagaaaatcgagattatcaacaattatgtcaaagtttgtctaatcgattagagccaatttctgtttcaaaacacccacaaatcgataaattaaaaaacaatatgttgaaaagtggtgcagatggtgcgttaatgagtggaagcggaccgactgtgtatgggctagcacgaaaagaaagccaagcaaaaaatatttataatgcagttaacggttgttgtaatgaagtgtacttagttagactattaggatagaagggttgaaaagatgagatataaacgaagcgagagaattgtttttatgacgcaatatttgatgaaccatccgaataaattgattccattaactttttttgtgaaaaaatttaaacaggcgaagtcttcaataagtgaagatgtccaaattataaaaaatacattccaaaaagaaaagttaggtacagtaattactactgctggcgcaagtggtggtgttacgtataaaccaatgatgagtaaagaagaggcgactgaagttgttaatgaggtcattactctattagaagagaaagaacgtttgttacctggcgggtatttatttttatcagatttggtaggtaatccatcgctactaaacaaagttggtaagttaattgccagtatttacatggaagaaaaattagatgctgttgttaccattgcgacaaaaggtatttcattggcaaatgcagttgctaatattttaaatttaccagtagtagtgattagaaaagacaacaaggtgactgaaggttctacagtttcaattaattacgtttcaggatcttcaagaaaaatagagacaatggtactttcgaagagaactttagcagaaaattcaaatgttttagttgtcgatgattttatgagggctggtggctctattaatggtgttatgaatttaatgaatgagtttaaagcccatgtaaaaggggtatcagtacttgtagaatcaaaagaagttaaacaaagattgattgaagattatacttccttagtgaaattatctgatgtagatgaatataatcaagagtttaacgtagaacctggcaacagtttatctaagttttcataaaaggagttttagtattatgaaaatcattaacacaacaagattaccggaagcacttggaccatattcgcatgcaacagttgtgaatggtatggtttatacttctggtcaaattccattgaatgttgatggacatatcgtaagcgctgatgttcaagaacaaacaaaacaagttttagataatctaaaggttgttttggaagaagcaggatctgatttgaattctgttgcgaaagcgaccattttcattaaagatatgaatgatttccaaaaaataaatgaagtgtatggtcaatattttaatgaacacaagccagcgcgtagttgtgtagaggttgcgcgtttgccaaaagatgtgaaagtagaaattgaattagtaagtaaaattaaggaattataattttcgattaatatgtttaatcaagcttctaaataaaacagagagatatatactataggggggctcactacatgaaagtgacagatgtaagacttagaaaaatacaaacagatggacgaatgaaagcactcgtttccattacattagatgaagctttcgtaattcatgatttacgtgtaattgaaggaaactctggcttgttcgttgcaatgccaagtaaacgtacaccagatggtgaattccgcgacatcgcgcatcctattaattcagatatgagacaagaaattcaagatgcagtgatgaaagtatatgatgaaacagatgaagtagtaccagataaaaacgctacatcagaagattcagaagaagcttaatcaattttatatttagcgatgtaatacatttgcaataagttgatttgatactgtcgataaagcataaagctttgtcggcagtttttttagtttgtattaatgttaattttatgaaatgaaaggctaataaatatatatgttaacagattatgatgatatgaaaattattgatacattgctgataaaaattgcgtttgaatgatgctcgtatttttgaattaaggaaaaagttgtttttaaaattacaacgaattaaaaacaatgccttttatatgttgaaagagtattgcagattaaattataataatgacgaagtgtaaaatttaatgggggttaatgttcatgcgaagacacgcgataattttggcagcaggtaaaggcacaagaatgaaatctaaaaagtataaagtgctacacgaggttgctggaaaacctatggtcgaacatgtattggaaagtgtgaaaggctctggtgtcgatcaagttgtaaccatcgtaggacatggtgctgaaagtgtaaaaggacatttaggtgagcgttctttatacagttttcaagaggaacaactcggtactgcgcatgcagtgcaaatggcgaaatcacacttagaagacaaggaaggtacgacgatcgttgtatgtggtgacacaccgctcatcacaaaggaaacattagaaacattgattgcgcatcacgaggatgctaatgctcaagcaactgtattatctgcatcgattcaacaaccatatggatacggaagaatcgttcgaaatgcgtcaggtcgtttagaacgcatagttgaagagaaagatgcaacgcaagctgaaaaggatattaatgaaattagttcaggtatttttgcgtttaataataaaacgttgtttgaaaaattaacacaagtgaaaaatgataatgcgcaaggtgaatattacctccctgatgtattgtcgttaattttaaatgatggcggcatcgtagaagtctatcgtaccaatgatgttgaagaaataatgggtgtaaatgatcgtgtaatgcttagtcaggctgagaaggcgatgcaacgtcgtacgaatcattatcacatgctaaatggtgtgacaatcatcgatcctgacagcacttttattggtccagacgttacaattggcagtgatacagtcattgaaccaggtgtacgaattaatggtcgtacagaaattggcgaagatgttgttattggtcagtactctgaaattaacaatagtacgattgaaaatggtgcatgtattcaacagtctgttgttaacgatgctagcgtaggagcgaatactaaggtcggaccgtttgcacaattgagaccaggcgcgcaattaggtgcagatgttaaggttggaaattttgtagaaattaaaaaagcagatcttaaagatggtgcaaaggtttcgcatttaagttatattggcgatgctgtaataggcgaacgtacgaatattggctgtggaacgataacagttaactatgatggtgaaaataaatttaaaactatcgtcggcaaagattcatttgtcggatgcaatgttaatttagtagcacctgtaacaattggtgatgatgtattggtggcagctggttccacaatcacagatgacgtaccaaatgacagtttagctgtggcaagagcaagacaaacaacaaaagaaggatataggaaataatcatttacgtatttaaaatggctaggataaaaggataatcctatgtaatattaatgtaatctttatgatttaatgattcgcatagtaatggagttacattttatatataatagtaattgcgtaagtaaataattggaggactataaatgttaaataatgaatataagaattcgtcattaaagattttttcattgaaaggaaacgaagcattagcgcaagaagttgctgaccaagtaggaattgaactaggtaaatgttcagttaaacgttttagtgatggagaaattcaaattaatatcgaagagagtattcgtggttgtgacgtatttattattcaaccaacatcatatcctgtgaatctacatttaatggaattattaattatgattgatgcttgtaaacgtgcttctgcagcaacaatcaatattgtagtgccatattatggatatgcaagacaagatagaaaagcccgtagccgtgagccaatcactgctaaattagttgcaaacttaatcgaaacagctggcgcaactcgtatgattgcgttagacttacatgcaccacaaattcaaggattctttgatattccaattgaccacttaatgggtgtgccaattcttgctaaacatttcaaagatgatccgaatattaacccagaagaatgtgtcgttgtttcaccagaccatggcggtgttacacgtgcacgaaaattagctgacattttaaaaactccaattgcaattatagataaacgtcgtcctagaccaaatgttgctgaagtgatgaacattgttggtgagattgaaggacgtacggcaattattattgacgatattattgatacagcaggtacaatcacgttagctgcacaagcattaaaagataaaggtgctaaagaagtatatgcttgttgtacacaccctgttttatcaggaccggctaaagaacgtatcgaaaattctgctataaaagaattaatcgtaacaaactcaattcatttagatgaagaccgcaaaccatctaacactaaagaattatctgttgctggtttaatcgcacaagctatcattcgtgtatacgaaagagaatcagttagcgtattatttgactaatatttaaaaggcgtttgacgaacatattccaaacgtgtataatagtttcgttcgtgattatacgaataaataaacacttgcaagcaacgattatgttgatgggtaagtgaggtgctcgttttgagcaaaaatgaaaggtggaaatgagaatggcttcattaaagtcaatcatccgtcaaggtaaacaaacacgttcagatcttaaacaattaagaaaatctggtaaagtaccagcagtagtatacggttacggtactaaaaacgtgtcagttaaagttgatgaagtagaattcatcaaagttatccgtgaagtaggtcgtaacggtgttatcgaattaggcgttggttctaaaactatcaaagttatggttgcagactaccaattcgatccacttaaaaaccaaattactcacattgacttcttagcaatcaatatgagtgaagaacgtactgttgaagtaccagttcaattagttggtgaagcagtaggcgctaaagaaggcggcgtagttgaacaaccattattcaacttagaagtaactgctactccagacaatattccagaagcaatcgaagtagacattactgaattaaacattaacgacagcttaactgttgcagatgttaaagtaactggcgacttcaaaatcgaaaacgattcagctgaatcagtagtaacagtagttgctccaactgaagaaccaactgaagaagaaatcgaagctatggaaggcgaacaacaaactgaagaaccagaagttgttggcgaaagcaaagaagacgaagaaaaaactgaagagtaattttaatctgttacattaaagtttttatactttgtttaacaagcactgtgcttattttaatataagcatggtgctttttgtgttattataaagcttaattaaactttattgctttgtactaaagttaaattaattttagtgagtaaaagacattaaactcaacaacgatacatcataaaaaatttaatgtacttgattttaaaatacatacttactaagctaaagaataatgataattgatggcaatggcggaaaatagatgttgtcattataataataaatgaaacaattatgttggaggtaaacacgcatgaaatgtattgtaggtctaggtaatataggtaaacgttttgaacttacaagacataatatcggctttgaagtcgttgattatattttagagaaaaataatttttcattagataaacaaaagtttaaaggtgcatatactattgaacgaatgaacggagataaagtgttatttatcgaaccaatgacaatgatgaatttgtcaggtgaagcagttgcaccgattatggattattacaatgttaatccagaagatttaattgtcttatatgatgatttagatttagaacaaggacaagttcgcttaagacaaaaaggaagtgcgggcggtcacaatggtatgaaatcaattattaaaatgcttggtacagaccaatttaaacgtattcgtattggcgtgggaagaccaacgaatggtatgacggtacctgattatgttttacaacgcttttcaaatgatgaaatggtaacgatggaaaaagttatcgaacacgcagcacgcgcaattgaaaagtttgttgaaacatcacgatttgaccatgttatgaatgaatttaatggtgaagtgaaataatgacaatattgacaacgcttataaaagaagataatcattttcaagaccttaatcaggtatttggacaagcaaacacactagtaactggtctttccccgtcagctaaagtgacgatgattgctgaaaaatatgcacaaagtaatcaacagttattattaattaccaataatttataccaagcagataaattagaaacagatttacttcaatttatagatgctgaagaattgtataagtatcctgtgcaagatattatgaccgaagagttttcaacacaaagccctcaactgatgagtgaacgtattagaactttaactgcgttagctcaaggtaagaaagggttatttatcgttcctttaaatggtttgaaaaagtggttaactcctgttgaaatgtggcaaaatcaccaaatgacattgcgtgttggtgaggatatcgatgtggaccaatttcttaacaaattagttaatatggggtacaagcgggaatccgtggtatcgcatattggtgaattctcattgcgaggaggtattatcgatatctttccgctaattggggaaccaatcagaattgagctatttgataccgaaattgattctattcgggattttgatgttgaaacgcagcgttccaaagataatattgaagaagttgatataacaactgcaagtgattatatcattactgaagaagtgatcagccatcttaaagaagagttaaaaagtgcatatgaaaatacaagacccaaaatagataaatcagtgcgcaatgatctgaaagaaacgtatgaaagttttaaattattcgaaagtacatactttgatcatcaaatactacgtcgtttagtagcgtttatgtatgaaacaccttcgacaattattgattatttccaaaaagatgcaatcattgcagttgatgaatttaatcgtattaaagaaactgaagaaagtttaacagtagagtctgattcgtttattagcaatattattgaaagtggtaatggatttataggacaaagttttataaaatatgatgattttgaaacattgattgaaggctatcctgtcacttatttttcattattcgctacaacaatgccgataaaactaaatcatattattaaattttcatgtaaacctgtccaacaattttatgggcaatatgacattatgcgttctgaatttcaacgatatgttaaccaaaattatcatatcgtggttttggtcgaaaccgaaactaaagttgaacgtatgcaagcgatgttaagtgaaatgcatattccatcaataacaaaattgcatcgctcaatgtcatcggggcaagcagtgattattgaaggcagtttatctgaaggatttgaactacctgatatgggattagttgtcattactgagcgtgagctttttaaatcaaaacagaaaaagcaacgaaaacgtacgaaagctatctcaaatgctgaaaaaattaagtcttaccaagatttaaatgtgggagattatattgttcatgtgcatcatggtgttggtagatatttaggtgttgagacgctcgaagtagggcaaacacatcgtgattatattaaattgcaatataaaggtacggatcaactatttgttccagtagatcaaatggatcaagttcaaaaatatgtagcttcggaagataagacgccaaaattaaataaactcggtggcagtgaatggaaaaaaacaaaagctaaagttcaacaaagtgttgaagatattgctgaagagttgattgatttatataaagaaagagaaatggcagaaggttatcaatatggggaagacacagctgagcaaacaacatttgaattagattttccatatgaacttacgcctgaccaagcgaaatctatcgatgaaattaaagatgacatgcaaaaatcgcgtccaatggaccgcttgctatgtggtgatgttggttatggtaaaactgaagttgcagtgagagcagcattcaaagctgtaatggaaggaaagcaggttgcatttttagttcctacaactattttagctcagcaacattatgagacgttaattgagcgtatgcaagattttcctgttgaaattcaattaatgagtcgttttagaacgcctaaagagataaagcaaactaaggagggacttaaaacggggtttgttgacatagttgttggtacacacaaattacttagtaaagatatacagtataaagatttaggactattgattgtagatgaagaacaacgatttggtgtacgccataaagagcgtattaaaacattaaaacataatgtagatgtactaacattgaccgcaaccccaatacctagaacattgcatatgagtatgctaggtgtgcgcgatttgtcagtcattgaaacgccaccagaaaatcgtttcccagttcaaacatatgtattagaacagaacatgagttttatcaaagaagctttagaaagagaactatcccgtgatggccaagtattttatctttataataaagtgcaatccatttatgaaaaacgagaacaactccagatgttaatgccagatgctaacattgcagttgctcatggacaaatgacagagcgcgatttagaagaaacgatgttaagttttatcaataatgaatatgatattttggtaacgacgacgattattgaaacaggtgtcgatgtcccaaatgcaaatactttgatcattgaagatgcagatcgctttggattgagtcagttgtatcaattaagaggtcgtgttggtcgttcaagtcgtattggttatgcatacttcttacatccagcaaataaggtactaactgagactgcagaagatcgattacaagcgattaaagaatttacggagttaggctcaggatttaagattgcgatgcgtgatttgaatattcgtggtgctggtaatttgttaggtaaacaacagcacggctttattgatacagttggatttgatttgtacagtcaaatgttagaagaagctgtaaatgaaaaacgtggtattaaggaaccagaatctgaggtgccagaagtcgaagttgatttaaacttggatgcatatttgccaacagaatatattgcaaatgaacaagctaaaattgaaatttataaaaagctacgaaaaactgaaacatttgatcaaattatcgacattaaagacgaattaattgatcgtttcaatgattatcctgttgaagtagcacgtttgcttgatatagtggaaataaaagtacacgcattacattcaggtatcacgttgattaaagataaagggaaaataattgatattcatttatctgtaaaagccactgaaaatattgatggcgaagtgctgttcaaagcaacacaacctttaggtagaacaatgaaggttggtgttcaaaataatgcaatgacaattactttaacgaaacaaaatcaatggcttgatagtttgaagttcttagttaagtgcattgaagaaagtatgagaatcagtgatgaagcataaagaagcatttaatggcgttgtcgtgttaactgctgcattaattgtcattaaaattctgagtgctgtatatcgaattccatatcaaaatatattaggcgatacaggtttgtatgcatatcaacaagtgtatccaattgtagcattaggaatgatattatcgatgaatgccattcctagtgcaattacacaaaatatagggaagtatcatagtgacgaagcatatgcaaaagcagtcgcttatatacaattagttggtatattattatttattgctatttttgtgtttgcgaacaatattgcacatatgatgggtgatagccatttaacaccaatgattcaagcagcaagtttaagctttatatttataggtatgcttggcgtgttaagaggttattatcaatctgcaaataatatgacagttccggctatttcccaggttatagaacaagttatacgagtaggtattattattgttactattgttgtttttgtagatagaggttggacgatatatgaagcgggaacaattgctattttagcatcaacgataggttttttaggttcttcaatttatttagtagcgcaccgaccttttaagtttaaaatggtaaataacactgcaaagatcgtttggaaacagttcgcactttcggttttgattttcgctatcagtcaattaatcgtaattttatggcaagtgattgatagtgttactattattaagtcacttcaagcgatacgcgtgccattcgatgttgccataactgaaaaaggagtctatgaccgtggtgcatcatttattcagatgggattgattgtaactacaacatttagttttgcgctcattcctctgttaagtgacgcaatcaaaatgaataatcaggtacttatgaatcgttatgcaaatgcgtcattaaagattacgattttaataagtacagcagcgggaataggattaattaatttattgcctttaatgaacggtgtattttttaagacgaatgatttaaccttaacgttaagcgtttatatgattacggtcatttgtgtatcattaattatgatggatatggcattattacaagctcaacatgctgtgagacctatttttgttggtatgacggcaggattggttattaaatttatacttaatatcattttgattcgtttaagtggcattattggtgcgagcattagtactgttgtatcattaattatattcggtacgattgtccatattgctgtcacgagaaaataccacttacatgcgatgagacgattttttatcaatgttgttttaggtatggtatttatgtcgattgttgttcaatgcgtgttaaacatagtgacaacacacggtagaatcactggactcattgaattattatgtgcagcagtattaggtatcattgcattgtttttctatatttttagatttaatgttttgacatataaagagttaacttatttaccatttggttcaaagttgtatcaaattaagaaaggaagacgttgatggcacataccattacgattgttggcttaggaaactatggcattgatgatttgccgctagggatatataaatatttaaagacacatgataaagtttatgcaagaacgttagatcatccagttatagaatcattgcaagatgaattaacatttaagagttttgaccatgtttatgaagcacatgaccaatttgaagatgtctataatgatattgtggcgcaattggttgaagctgctaatgaaaaagatattgtctatgcggttccgggtcatcctagagttgctgagacaactacagtgaaattactggctttagcaaagaacaatactgatatagatgtgaaagttttaggtgggaaaagctttattgatgatgtgtttgaagcagttaatgtagatccaaatgatggcttcacactgttagatgcgacatcattacaagaagaaacacttaatgttagaacgcatacattgattacgcaagtttatagtgcaatggttgctgctaatttgaaaatcactttaatggaacgatatcctgatgattaccctgttcaaattgtcactggtgcacgaagtgatggtgtggataacgttgtgacatgcccattatatgaattggaccatgatgaaaatgcattcaataatttgacgagtgtattcgtaccaaaaatcacaacaccgacatatttgtatcatgactttgattttgcaacggaagtgattgatactttagttgatgaagataaaggttgtccatgggataaagtgcaaacgcatgaaacgcttaaacgttatttacttgaagaaacatttgaattgttcgaagctattgacaatgaagatgattggcatatgattgaagaactaggagatattttattacaagtgttattgcatactagtattggtaaaaaagaagggtatatcgacattaaagaagtgattacaagtcttaatgctaaaatgattcgtagacacccacacatatttggtgatgctaatgctgaaactatcgatgacttaaaagaaatttggtctaaggcgaaagatgctgaaggtaaacagccaagagttaaatttgaaaaagtatttgcagagcattttttaaatttatatgagaagacgaaggataagtcatttgatgaggccgcgttaaagcagtggctagaaaaaggggagagtaatacatgagattagataaatatttaaaagtatcacggttaataaagcgacgtacgctagcaaaagaggtaagtgatcaaggtagaattacaataaatggtaatgttgctaaagctggatcggatgttaaagttgaagatgtgctgacgattcgctttggtcaaaaattagtaacagttaaagtaactgcattaaatgaacatgcatctaaagataacgcgaagggcatgtatgaaatcattgaagagcgtcgacttgaagaagcgtaaattggaggtgacaagcaatgaaaaataaagtagaacatatagaaaatcagtacacgtcgcaagagaacaagaaaaaacaacgtcaaaaaatgaaaatgcgtgttgttcgtaggcgtattacagtatttgcgggcgtattacttgcgataattgttgttttatcaatcttgcttgttgtccaaaaacatcgcaatgatattgatgcacaggagcgaaaagcgaaagaagcacagtttcaaaagcaacaaaatgaagaaattgcgttaaaagaaaagttgaataatctgaatgacaaagattatattgaaaaaattgcgcgtgatgattattacttaagcaacaaaggtgaagtgatttttaggttgccagaagacaaagattcgtctagctcaaaatcttcgaaaaaataaatccaaattgattcaaaattatccgagtatagacattgtgaaaaaatccaaacaaggatataataagggaaaatcgaatcaaatcgggaggatttatttaacatatgtcaatcgaagttggaaataagcttaaaggtaaagtcactggtattaaaaagtttggtgcattcgtagaattacctgaaggaaaaagtggtttagttcacattagtgaagtcgcagataattatgttgaaaacgtagaagagcacctttctgttggtgatgaagtagacgtaaaagtattatctattgctgatgatggaaaaattagtctttcaataaagaaagctaaagaccgtccacgtagacaacatacgagtaaaccaagtcatcaaaaaccagtgcaaaaagccgaagattttgaaaagaaattaagcaatttcttaaaagatagtgaagataaattaacttcaatcaaacgtcaaacagaatctagacgcggtggcaaaggttctagacgttaattaaaataaataaagactgtttcgataaggaatatatttagaatgatgcgtatcgaataatcgattgcagcgttagacaatctaagactgtttcttaaataaggagcagtctcttttatttgtaatgatataactaagacttataccatttttgaaaattgtaaaagtgaggtgatgttatgcagttaaatagtaatggttggcatgttgatgaccatattgttgtcgcagtttctacaggtattgatagtatgtgtttattgtatcaactactaaatgattataaagatagttatagaaaactaacatgtttacatgtcaatcatggcgttaggtcagcttcaaacgaggaagccagatttttagaagcatactgcgatcgtcaccacatcgatttacatatcaaaaagttggatttgtcgcatagtctcaatcgaaataacagcattcagaatgaagctcgaattaaacgttacgaatggtttgatgaaatgatgaatgtattagaagcggatgtattgctaacggcgcatcatttggacgatcaattagaaactattatgtatcgcatttttaatgggaaatcaacgcgcaataaactaggatttgatgagttgtcgaagcgaaaaggttatcagatttatcgaccacttttagctgtctctaaaaaagaaataaaacaattccaagagagatatcatataccatattttgaagatgaatctaataaagataacaaatatgttagaaatgatattcgtaatagaattattccagctattgatgaaaataatcaacttaaagtatcgcatttattaaaattaaaacaatggcatgatgaacaatatgatattttgcaatattcagctaaacaatttattcaagaatttgtgaagtttgatgaacagtcaaaatatttagaggtttctagacaatcttttaatgacttgccaaactcattaaagatggttgtgttggattgcctattatcaaagtattatgagttgtttaatattagtgctaaaacatacgaagagtggtttaaacaatttagtagtaagaaagcacaattcagtattaatctcacggataaatggataattcaaatcgcatatggtaaattaataataatggctaaaaataatggcgatacatattttagagttcaaactattgaaaagccaggtaattatatttttaacaaatatcgattagagatacattctaatttaccaaaatgtttatttccgcttacagtgagaacacgacaaagtggcgatacatttaaactgaatgggcgcgatggttataagaaagtgaatcgcctgtttatagattgtaaagtgcaacagtgggttcgggatcaaatgccaatcgtattggataaacaacagcgcattattgcggtaggagatttatatcaacaacaaacaataaaacaatggattataattagtaaaaatggagatgaatagcgttatgcataatgatttgaaagaagtattgttaactgaagaagatattcaaaatatctgtaaggaattgggagcacaattaacaaaggattatcaaggtaaaccattagtatgcgtgggtatcttaaaaggctcagcaatgtttatgtcagatttaattaaacgaattgatacccatttatcaattgatttcatggatgtttctagttatcacggaggcactgagtcaactggtgaagttcaaatcattaaagatttaggttcttctattgaaaataaagacgtattaattattgaagatatcttagagactggtactacacttaagtcaattactgaattattacaatctagaaaagttaattcattagaaatagttactttattagataaaccaaaccgtcgtaaagcggacattgaagctaagtatgtaggtaaaaaaataccagatgaatttgttgttggttacggtttagattatcgtgaattataccgaaacttaccatatattggtacgttaaaacctgaagtgtattcaaattaattttttaatcaatttcagttattattactatgcgtttaagaaataatagtgtagactcaaaaatatgaaaaatgtatttcatatatatttaattttagacaagacatatgtcttaaaaagttgaaaaatatagagattgataaaactaacacagggtgtgaatgacattgatgttaagctcaattactagcttataaaacatgtcatatgttacaatttttgttagttttattatgggaagtaggaggaaatgacgcatgcagaaagcttttcgcaatgtgctagttatcgtaataataggcgttattatttttggtctattttcatatttaaacggtaatggaaatatgccgaaacagcttacatataatcaatttactgagaagttggaaaaaggtgaccttaaaactttagaaatccaaccacaacaaaatgtctatatggtaagtggtaaaacgaaaaatgatgaagactattcatcaactattttatataacaacgaaaaagaattacaaaaaattactgatgctgctaaaaagcaaaacggtgtaaaattaacgattaaagaagaagaaaaacaaagtgtctttgtgagtatactttcaacattaattccagttgtagtcatagcgttattatttattttcttcctaagccaagcacaaggtggcggtagtggcggtcgtatgatgaactttggtaaatctaaagcaaaaatgtacgataataataaacgtcgtgttcgtttctctgatgtagcaggggcagatgaagaaaaacaagaattaattgaaattgttgatttcttgaaagataataaaaaattcaaagaaatgggatctaggattcctaaaggtgtcttacttgttgggcctccaggtactggtaaaacattacttgctagagcggttgcaggtgaagcaggcgcaccattcttctctattagtggttcagactttgtagagatgtttgttggtgttggtgcgagccgtgttcgtgacttattcgataatgctaagaaaaacgcgccttgtatcatctttatcgatgagattgatgctgttggtcgtcaacgtggtgcaggtgttggtggcggtcatgatgaacgtgaacaaaccctaaaccaattattagttgaaatggatggattcggtgaaaatgaaggtatcataatgatagctgctacaaaccgtcctgatatccttgacccagccttattacgtccaggtcgttttgatagacaaattcaagttggtcgtccagatgtgaaaggccgtgaagcaattcttcatgttcatgctaaaaacaaaccacttgatgaaacggttgatttaaaagcaatttcacaacgtacacctggtttctcaggtgctgatttagagaacttattaaatgaagcatctttaattgctgtacgtgaaggtaaaaagaaaattgacatgagagatatcgaagaggcaacggatagagttatagccggacctgctaagaaatctcgagttatttctaagaaagaacgtaatattgttgctcatcacgaagctggtcatacaattatcggtatggtacttgatgaggcagaagtagtgcataaagttactattgttccacgtggacaagcaggtggttatgcaatgatgctacctaaacaagatcgtttcttaatgactgaacaagagttattagataaaatctgtggtttacttggtggacgtgtatcagaagatattaactttaacgaagtatcaacaggtgcttcaaatgacttcgaacgtgcaacacaaatcgcacgctcaatggttacgcaatatggtatgagtaaaaaattaggaccattacagttcggtcatagcaatggtcaagtattcttaggtaaagatatgcaaggtgagcctaattattcaagccaaatcgcatatgaaattgataaagaagttcaacgaatcgttaaagaacaatacgaacgttgtaaacaaattttattagagcacaaagaacaattaattttaattgctgaaacattattaacagaagaaacattagttgctgaacaaattcaatcattattctacgaaggtaaattacctgaaattgattatgatgcagctaaagttgttaaagatgaagattctgaatttaatgatggtaaattcggtaaatcttatgaagaaattcgtaaagagcaattagaagatggaaaacgtgacgaaagtgaagatcgtaaagaagaaaaagatattgctgaggataaaaaagaagctgataaatctgatgaaaaagatgaaccagcacatcgacaagccccaaatatcgaaaaaccttacgatccaaatcacccagacaataaataatcgattatattcagtacctctttctatgataaagttatagaaagaggtacttttatgatttaaggaatacacgattacttactaagtaatggtattatggcacgaatagttaataatcaaacaagttgcttcattatttagaatgatgggtgtagaataagtacaattgttgcattttatgaagtaaagtaatttttaaaatatagagtaatagaggagattgaaataatgacacacgattatattgttaaagcattagcatttgatggggagattagggcttatgctgctttgacaactgaaactgttcaagaagcacaaacgagacattatacatggccgacagcatctgctgcaatgggaagaacaatgacagcaacagctatgatgggcgcaatgttgaaaggtgatcaaaaattaactgtcactgtagatggccaaggacctattggacgaattattgccgatgcaaatgctaaaggcgaggtgcgtgcttatgtagaccatccacaaactcattttccattaaatgagcaaggtaaacttgatgtaagacgagcagtagggactaatggatctattatggttgttaaagacgttggaatgaaagactatttctctggagcaagtccaattgtttcaggagaacttggtgaagattttacttattattatgctacaagtgaacaaacaccttcatcggtaggtcttggtgtattggtaaatcctgataatacgattaaagcagcaggaggatttatcattcaagttatgccaggtgccaaagatgaaacaatttcaaaattagaaaaagcaattagtgaaatgacaccagtttctaaattaattgaacaaggattaacgccagaaggattactaaacgaaatcttaggtgaagaccatgtgcaaattttagaaaaaatgcctgttcaatttgaatgtaattgtagtcatgagaaatttttaaatgctattaaaggattgggcgaggctgagattcaaaatatgattaaagaagatcatggtgctgaagcagtatgtcatttctgtggaaataaatataaatatactgaagaagaattaaacgtgttgctagaaagtttagcgtaatttaatttaaatcaatacgctaaaatgtttatttttagcggtttagtgaaatgtagaactaaatagttgtataatccttagtaattttgtttgatttctagaatttatttgataaaataattctatatccgataaataaactaagatttcaacaactaactaaaaaggagtgttcttaatggcacaaaaaccagtagataatattactcaaattattggcggtacaccggtagtcaaattgagaaatgtagtagatgacaatgcagcagatgtttatgtaaaattggaatatcaaaatccaggtggttctgtaaaggatagaattgctttagcaatgattgaaaaagcagagcgagaaggcaaaattaaacctggcgatacaattgtagaaccaactagtggtaatacgggtattggtttagcatttgtatgtgctgctaaaggatataaagcagtatttacaatgcctgagacaatgagccaagagcgtcgtaatttattaaaagcatacggtgcggaattagtcttaacgcctggatcagaagcgatgaaaggtgcaattaaaaaagctaaagaattaaaagaagaacatggttacttcgagccacaacaatttgaaaaccctgcgaaccctgaagttcatgagttaactacaggtcctgagttattacaacaatttgaagggaaaactatcgatgcgttcctagctggtgttggtactggcggtacgttatctggtgtaggtaaagttctgaaaaaagaatatcctaacatcgaaattgttgctatagagcctgaggcttctccagtattgagcggtggtgagccaggtccacataaattacaaggtttaggtgctggatttattccaggtactctgaatacagaaatctatgacagtattattaaagtaggaaatgatacagcgatggaaatgtctcgtcgagttgctaaagaggaaggtattttagcaggtatttcatcaggtgctgcgatttatgctgccattcaaaaagcaaaagaattaggaaaaggtaaaacagtagtaacagtattgccgagtaatggtgaacgctacttatcaacacctttatattcattcgatgactaattaatgtcatttaaaagagtgagttatctttttgagataacttgctctttttttctaccatgtataattttaaaattatgagcgttaaattaaacatttttctgataaaaacatccagtgaatgataagataataaacgtacatactaataactagtaaatcgcaggagtaaattttattagagttaaacaatacataattaaagggtggttaacatgactaaaacaaaaattatgggcatattaaacgtcacacctgattcattatcagatggtggaaaatttaataatgttgaatcagcagtaactagagtgaaagcgatgatggatgaaggtgttgatattatagatgttggaggtgtttcaacgagaccaggacacgaaatgattactgtggaagaagagttgaatagagtattacctgttgttgaagctattgtcggttttgatgtaaaaatttcagtcgatacatttcgaagtgaggttgctgaagcatgtttaaaattaggtgttgatatcattaatgatcaatgggcggggctgtatgatcatcgcatgtttcaagttgtagccaaatacgatgcggaaattgttttaatgcataatggcaatggcgaacgtgaggaaccagttgttgaagaaatgttgacatctttacttgcacaagcacatcaagctaaaatgtcaggtgtttcagtagataaaatttggctagatccgggaattggttttgccaagacaagagaagaggaagccgaagtaatggtaagactggatgaacttgtggccacagggtacccagttttattagcgacaagtcgtaaacgtttcactaaagaaatgatggactatgatacaacgccagttgaaagggatgaagtgaccgctgcaacgacagcgtatggtattatgaagggtgttaaagcagtacgcgtacataatgttgcgttaaatgctaaattagctaatggtatagattttttaaaggagaatgaaaatgcaagacacaatctttcttaaaggtatgcgcttttatggatatcatggtgctttatcagctgaaaatgaaatagggcaaattttcaaagtggatgtaactttaaaagtagacttatctgaagctggtcgtactgataatgttattgatacagttcattatggtgaagtgttcgaagaggttaaatcaattatggaaggtaaggccgttaatttacttgagcatctagctgaacgtattgcaaatcgtataaattcacaatataatcgtgtaatggaaacgaaagtgagaatcactaaagaaaacccaccgattccgggtcattatgatggagtaggtatcgaaatagtgagggagaataaatgattcaagcatacttaggattaggtagtaatattggcgatagagaaagccagttaaacgatgctataaagattttgaatgaatatgatggtattaacgtatctaatatttctccgatttatgaaacagcaccagttgggtatactgagcaacctaactttttaaatttgtgtgttgaaattcaaacaacactcacagtattacaactgttggaatgttgtttgaagacagaagaatgtttacaccgtgttagaaaggaacgatggggtcctagaactttagatgtggatattttgttgtatggagaagaaatgatagatttaccaaaactgtcggtgccacatccgagaatgaatgaacgtgcatttgttttaatcccattaaatgatatagcagcaaatgtcatagaaccacgttcgaaattgaaagtgaaagatttagtttttgtcgatgacagtgtaaagagatataaataaggtattgttgataacattcatatttattaggaatagatgattgattattggagatgtttccgcattttgattatctctaaatgcatttgatttcgaattagtatatgatgatttagtatgtgttagaattaagttatttcataaaatcaaattaagcaatatttgataaattgctgtaatttatttgggcttttgttgaagtttgtgaaagataatttttatacatttacttagggttgtattaatgataatcgtattttaaatgaataagtaattcataaacgaaaacagaaattgctttattacatttacaacctcttgtaaaattaaaaaagtgataaaattgatgttatgaatataagaaaacatgccacatcataactttaaggtgcaatggataatgataaagtattagtaacatcgaaagagatgtatgttgagcaaaaatgtctgatattttataaaactttaaaggaatatgtttgagtgtaccagttggaatactaatggattacaacaagttaaaggagagaaagttatgtcagaagaaatgaatgaccaaatgttggttcgacgtcaaaaattacaagaattatatgatcttggtatagacccatttggttctaaatttgaccgttcaggtttatctagtgatttgaaagaagagtgggaccagtattctaaagaagaattggtagaaaaagaagcggatagtcatgtcgctatagctggacgattaatgactaagcgtggtaaaggtaaagcaggatttgcacacgttcaggacttagctggacaaattcaaatatacgttcgtaaagatcaagttggcgatgacgaatttgatttatggaaaaatgctgatttaggcgatatcgttggtgttgaaggtgtaatgttcaaaacaaatactggcgaattatcggttaaagcgaagaaattcacgctactaactaaatcattgcgaccattaccggataaattccacggtttacaggatattgaacagagatatcgtcaaagatatttagatttaattacgaacgaagatagcactcgtacatttattaatcgtagtaaaatcattcaagaaatgcgtaattatttaaataataaaggtttcttggaagtagaaacacctatgatgcaccaaattgctggtggcgcagctgctagaccatttgtaacacatcataatgcattagatgcaacgttatacatgcgtattgctattgagttgcatttaaaacgtttaattgtcggtggacttgaaaaagtatatgaaattggtagagtattccgtaatgaaggtgtatcaactagacataaccctgaattcacaatgattgaattatatgaagcatatgcagattatcatgacattatggatttaacagaatctatggtgagacatattgccaatgaagtattaggttctgcaaaagtacaatacaatggggaaacgattgatttagaatctgcttggactcgtttgcatattgttgatgctgtaaaagaagctactggtgtagatttttatgaagttaaaagtgatgaagaagctaaagctttagctaaggaacatggtattgaaattaaagatacaatgaaatatggtcatattttaaatgaattctttgagcaaaaagttgaagaaacacttattcagccaacgtttatctatggtcatccgactgaaatttcacctttagcgaagaaaaatcctgaagatcctagatttactgatcgtttcgaattgttcattgtaggtagagagcatgcaaatgcatttactgaattaaatgatcctattgatcaaaaaggtcgctttgaagcgcaacttgttgaaaaagcgcaaggtaatgatgaagcgcatgaaatggatgaagattacattgaagcgttagaatatggtatgcctccgacaggtggtcttggtatcggtattgacagattagttatgttattaactgactctccatcaatcagagacgtattattattcccttatatgagacaaaaataaatgacgttgattgttagtaagagctctcgtgtatacatcatgtgtatgcgagggttttcttaattatggtaattagtttgtgtttgaatgtttttgatagtaatagttaacgataatggtgctatttttgactgttaaacaagttagttagctgatagatgaaaatgacgatatgtatatagagtagttctgatgagaaatgttaacgatagacattgagatatcttataacaaaaattgctatattagtataatttatcttaatcagctataaaagtactttaaaattgtatagaatgtgtatggttttgtacatatgtgtatgatagaatactaaaagtgttatgaattagagagcacgagaaatgtgagttttgaagaataaaaaagttgattaaaagtgttgactttatcaatcgaatgaagtaatatataaaagtcgtcaaaaacagacgaaacacactaaaagctgatgtgacaaagttcacaacaaagtgtaaaattaactattgcgccttattaattaagcgtgtatcataaataagtaagttattttgtctggtgactatagcaaggaggtcacacctgttcccatgccgaacacagaagttaagctccttagcgtcgatggtagtcgaacttacgttccgctagagtagaacgttgccaggcaaatgacaaatcggagaattagctcagctgggagagcatctgccttacaagcagagggtcggcggttcgaacccgtcattctccaccatttattcttacatatagccggcctagctcaattggtagagcaactgacttgtaatcagtaggttgggggttcaagtcctctggccggcaccatcttttgagccattagctcagctggtagagcatctgacttttaatcagagggtcagaggttcgaatcctctatggctcattacgatttaatttttatatttagcaaaataatgcagaagtagttcagcggtagaatacaaccttgccaaggttggggtcgcgggttcgaatcccgtcttctgctccattattttgccggggtggcggaactggcagacgcacaggacttaaaatcctgcggtgagagatcaccgtaccggttcgattccggtcctcggcaccattttagcgcccgtagctcaattggatagagcgtttgactacggatcaagaggttatgggttcgactcctatcgggcgcgccatttttaaattaattgaataacgggaagtagctcagcttggtagagcacttggtttgggaccaaggggtcgcaggttcgaatcctgtcttcccgattacttcttaaattccattttatgggggcttagctcagctgggagagcgcctgctttgcacgcaggaggtcagcggttcgatcccgctagtctccaccatttatttttacacgatgaacattgaaaactgaatgacaatatgtcaacgttaattccaaaaaacgtaactataagttacaaacattatttagtatttatgagctaatcaaacatcataatttttatggagagtttgatcctggctcaggatgaacgctggcggcgtgcctaatacatgcaagtcgagcgaacggacgagaagcttgcttctctgatgttagcggcggacgggtgagtaacacgtggataacctacctataagactgggataacttcgggaaaccggagctaataccggataatattttgaaccgcatggttcaaaagtgaaagacggtcttgctgtcacttatagatggatccgcgctgcattagctagttggtaaggtaacggcttaccaaggcaacgatgcatagccgacctgagagggtgatcggccacactggaactgagacacggtccagactcctacgggaggcagcagtagggaatcttccgcaatgggcgaaagcctgacggagcaacgccgcgtgagtgatgaaggtcttcggatcgtaaaactctgttattagggaagaacatatgtgtaagtaactgtgcacatcttgacggtacctaatcagaaagccacggctaactacgtgccagcagccgcggtaatacgtaggtggcaagcgttatccggaattattgggcgtaaagcgcgcgtaggcggttttttaagtctgatgtgaaagcccacggctcaaccgtggagggtcattggaaactggaaaacttgagtgcagaagaggaaagtggaattccatgtgtagcggtgaaatgcgcagagatatggaggaacaccagtggcgaaggcgactttctggtctgtaactgacgctgatgtgcgaaagcgtggggatcaaacaggattagataccctggtagtccacgccgtaaacgatgagtgctaagtgttagggggtttccgccccttagtgctgcagctaacgcattaagcactccgcctggggagtacgaccgcaaggttgaaactcaaaggaattgacggggacccgcacaagcggtggagcatgtggtttaattcgaagcaacgcgaagaaccttaccaaatcttgacatcctttgacaactctagagatagagccttccccttcgggggacaaagtgacaggtggtgcatggttgtcgtcagctcgtgtcgtgagatgttgggttaagtcccgcaacgagcgcaacccttaagcttagttgccatcattaagttgggcactctaagttgactgccggtgacaaaccggaggaaggtggggatgacgtcaaatcatcatgccccttatgatttgggctacacacgtgctacaatggacaatacaaagggcagcgaaaccgcgaggtcaagcaaatcccataaagttgttctcagttcggattgtagtctgcaactcgactacatgaagctggaatcgctagtaatcgtagatcagcatgctacggtgaatacgttcccgggtcttgtacacaccgcccgtcacaccacgagagtttgtaacacccgaagccggtggagtaaccttttaggagctagccgtcgaaggtgggacaaatgattggggtgaagtcgtaacaaggtagccgtatcggaaggtgcggctggatcacctcctttctaaggatatattcggaacatcttcttcagaagatgcggaataacgtgacatattgtattcagttttgaatgtttatttaacattcaaatattttttggttaaagcgatattgcttatgcgagcgcttgacaatctattctttttaaagaaagcggttgtcagacaatgcattaagaaaaattaaagcggagtttacttttgtaaatgagcatttgattttttgaaaacaaagcagtatgcgagcgcttgactaaaaagaaattgtacattgaaaactagataagtaagtaaaatatagattttaccaagcaaaaccgagtgaataaagagttttaaataagcttgaattcataagaaataatcgctagtgttcgaaagaacactcacaagattaataacgcgtttaaatctttttataaaagaacgtaacttcatgttaacgtttgacttataaaaatggtggaaacatagattaagttattaagggcgcacggtggatgccttggcactagaagccgatgaaggacgttactaacgacgatatgctttggggagctgtaagtaagctttgatccagagatttccgaatggggaaacccagcatgagttatgtcatgttatcgatatgtgaatacatagcatatcagaaggcacacccggagaactgaaacatcttagtacccggaggaagagaaagaaaattcgattcccttagtagcggcgagcgaaacgggaagagcccaaaccaacaagcttgcttgttggggttgtaggacactctatacggagttacaaaggacgacattagacgaatcatctggaaagatgaatcaaagaaggtaataatcctgtagtcgaaaatgttgtctctcttgagtggatcctgagtacgacggagcacgtgaaattccgtcggaatctgggaggaccatctcctaaggctaaatactctctagtgaccgatagtgaaccagtaccgtgagggaaaggtgaaaagcaccccggaaggggagtgaaatagaacctgaaaccgtgtgcttacaagtagtcagagcccgttaatgggtgatggcgtgccttttgtagaatgaaccggcgagttacgatttgatgcaaggttaagcagtaaatgtggagccgtagcgaaagcgagtctgaatagggcgtttagtatttggtcgtagacccgaaaccaggtgatctacccttggtcaggttgaagttcaggtaacactgaatggaggaccgaaccgacttacgttgaaaagtgagcggatgaactgagggtagcggagaaattccaatcgaacctggagatagctggttctctccgaaatagctttagggctagcctcaagtgatgattattggaggtagagcactgtttggacgaggggcccctctcgggttaccgaattcagacaaactccgaatgccaattaatttaacttgggagtcagaacatgggtgataaggtccgtgttcgaaagggaaacagcccagaccaccagctaaggtcccaaaatatatgttaagtggaaaaggatgtggcgttgcccagacaactaggatgttggcttagaagcagccatcatttaaagagtgcgtaatagctcactagtcgagtgacactgcgccgaaaatgtaccggggctaaacatattaccgaagctgtggattgtcctttggacaatggtaggagagcgttctaagggcgttgaagcatgatcgtaaggacatgtggagcgcttagaagtgagaatgccggtgtgagtagcgaaagacgggtgagaatcccgtccaccgattgactaaggtttccagaggaaggctcgtccgctctgggttagtcgggtcctaagctgaggccgacaggcgtaggcgatggataacaggttgatattcctgtaccacctataatcgttttaatcgatggggggacgcagtaggataggcgaagcgtgcgattggattgcacgtctaagcagtaaggctgagtattaggcaaatccggtactcgttaaggctgagctgtgatggggagaagacattgtgtcttcgagtcgttgatttcacactgccgagaaaagcctctagatagaaaataggtgcccgtaccgcaaaccgacacaggtagtcaagatgagaattctaaggtgagcgagcgaactctcgttaaggaactcggcaaaatgaccccgtaacttcgggagaaggggtgctctttagggttaacgcccagaagagccgcagtgaataggcccaagcgactgtttatcaaaaacacaggtctctgctaaaccgtaaggtgatgtataggggctgacgcctgcccggtgctggaaggttaagaggagtggttagcttctgcgaagctacgaatcgaagccccagtaaacggcggccgtaactataacggtcctaaggtagcgaaattccttgtcgggtaagttccgacccgcacgaaaggcgtaacgatttgggcactgtctcaacgagagactcggtgaaatcatagtacctgtgaagatgcaggttacccgcgacaggacggaaagaccccgtggagctttactgtagcctgatattgaaattcggcacagcttgtacaggataggtaggagcctttgaaacgtgagcgctagcttacgtggaggcgctggtgggatactaccctagctgtgttggctttctaacccgcaccacttatcgtggtgggagacagtgtcaggcgggcagtttgactggggcggtcgcctcctaaaaggtaacggaggcgctcaaaggttccctcagaatggttggaaatcattcatagagtgtaaaggcataagggagcttgactgcgagacctacaagtcgagcagggtcgaaagacggacttagtgatccggtggttccgcatggaagggccatcgctcaacggataaaagctaccccggggataacaggcttatctcccccaagagttcacatcgacggggaggtttggcacctcgatgtcggctcatcgcatcctggggctgtagtcggtcccaagggttgggctgttcgcccattaaagcggtacgcgagctgggttcagaacgtcgtgagacagttcggtccctatccgtcgtgggcgtaggaaatttgagaggagctgtccttagtacgagaggaccgggatggacatacctctggtgtaccagttgtcgtgccaacggcatagctgggtagctatgtgtggacgggataagtgctgaaagcatctaagcatgaagcccccctcaagatgagatttcccaacttcggttataagatccctcaaagatgatgaggttaataggttcgaggtggaagcatggtgacatgtggagctgacgaatactaatcgatcgaagacttaatcaaatttaaatgttttgcgaagcaaaatcacttttacttactatctagttttgaatgtataatctacattcatatgtctggtgactatagcaaggaggtcacacctgttcccatgccgaacacagaagttaagctccttagcgtcgatggtagtcgaacttacgttccgctagagtagaacgttgccaggcaagttgagaccgcaaggtctctttttttatgtctaaaatgtcaaagtaaaaaagaaaacacaaagaaaaatggcttggcgaagtgaaaacgtttgaatctgacgaaacgagaaaagagcgcaacgagtttagtagagctaaatgagtaagtgagagccgaagaagaggaaagaagcaagcgattgtcacaagacaagaaaggttcttagcgacgatggtagccaacttacgttccgctagagtagaacgttgccaggcaaaaatggatgcgatgagccgcattgagttttggaaatgataatttaataatgttcattttcgattgtctaagtatgtacaattttaattttgtgtttatataaatctaaaatgatatcatctaaaacaaaatattgtataaatagagaagagcagtaagacagtatctaattgaaaatgatcttactgctcttttatatactttatcgaattacaaaaaggaaattaattattatacaatagacaagctattgcataagtaacactaacttttgtcaaagaagtgttactttataattaatgattttattagagcgtctacatgcggttttaaagcatcatcgtctataccgccaaagcctaatataaatttaggggttttcttatagtcttgatcatcatcgaaattataaacttgtaattttaagtttactttgtttgctctatcaagacacttttgtaatgttaatccattttttactgtaattgtaaaatgcatacccgtttcagcaccttgaatatcaagctgctctttgtaaggtttcaatctttttaaaatataggttagttttctacgataaattcgtctcattttatttaaatgcctttcaaaaccaccggaagatataaacgttgcaataaggttttgcatatgaacaggtacagtgttgccttcaatgtgattttgagaatgatattttttcattatagaatagggtaacaccatatatgcaacacgacagctaggaaaaatagactttgaaaatgtactgatataaatcactttttctcctcttgaatatagaccttgaattgctggaatgggtttaccgaaatatctaaactcggaatcataatcatcttctataataaatcgttcttctttttcttgggcccattgtattaattgagttcgcttttttaagtccattacatatccagttggaaattgatgggaaggtgttatataaactatatttttttgtgatttaataacttcatctacgtttattccattatcttcaacttcaatttgttcatattcaacttgttttttatctaaaatatttttgattggtggataactaggtttttcgataataaacgttgaagtataaagtaaatcgactaattgatttactaattgttcggtagatgagccaattataatttgattaggatcacaaattacaccacgattagtaaataaataaaatgccagttgaaatcttaaatgtaattctccttgaaagtgtcctctacgtaattgatttaaatgatttgtatcataaagatctttggaatactttctgaaaagttctatagggaaatgtttcgtatctatttcatccaaattaaaagcataatcataagattcatcactcgcttttggattatatgaatcatcatcaaaaagagaagggataggttgattgtttaaaattgttaaagattcaatttcggacacaaaatatccagagcgaggtcttgaataaatgtaaccttcatctaatagaagttgatatgcatgttctacggttgtttggctgatagataaatgtttgcttaattgtcttttagaataaaatttatcgccttctttaaattgaccttcaattatttgtttttttaatttttcataaagttgatggtataaagtgtttttcaattttataactgacctcctaaatttatcttattttgtacctttttaaatatcagtttatacattacaatgtatttaatcaacttgaaaaggggttttatgtataatgagtaaaattattggatcagacagagtcaaaagaggtatggctgaaatgcaaaaaggcggcgttattatggatgtcgttaatgctgagcaagcaagaattgcagaagaagctggcgcggtagcagttatggcattagaacgagtaccttctgatattagagctgctggtggcgttgcacgtatggcaaaccctaaaattgtagaagaagtaatgaatgctgtttctattccagtcatggctaaagcacgtattggtcatatcactgaagcaagagtattagaggcgatgggtgttgactatattgatgaatcagaagtgttaacaccagcagatgaggaatatcacttaagaaaagatcaatttacagtaccatttgtatgtggatgtcgtaatttaggtgaagctgcgcgtagaattggtgaaggtgctgctatgttacgtactaaaggtgaaccaggtacaggtaatattgttgaagctgtaagacatatgagacaagttaattcagaagttagtcgattgactgtaatgaatgatgatgagattatgactttcgcgaaagatatcggtgcgccttatgaaattttaaaacaaattaaagacaatggtcgtttaccggtagttaactttgcagctggtggcgttgcgactcctcaagatgctgctttaatgatggaattaggtgccgatggtgtattcgttggatcaggtatttttaaatcagaagatccagaaaaatttgctaaagcaattgttcaagcaacaacacattaccaagactatgaactaattggaagattagcaagtgaacttggcactgctatgaaaggtttagatatcaatcaattatcattagaagaacgtatgcaagagcgtggttggtaagatatgaaaataggtgtattagcattacaaggtgcagtacgtgaacatattagacatattgaattaagtggtcatgaaggtattgcagttaaaaaagttgaacaattagaagaaatcgagggcttaatattacctggtggcgagtctacaacgttacgtcgattaatgaatttatatggatttaaagaggctttacaaaattcaactttacctatgtttggtacatgcgcaggattaatagttctagcgcaagatatagttggtgaagaaggataccttaacaagttgaatattactgtacaacgaaactcattcggtagacaagttgacagctttgaaacagaattagatattaaaggtatcgctacagatattgaaggtgtgtttataagagcgccacatattgaaaaagtaggtcaaggcgtagatatcctatgtaaggttaatgagaaaattgtagctgtccagcaaggtaaatatttaggcgtatcattccatcctgaattaactgatgactatagagtaacggattactttattaatcatattgtaaaaaaagcatagcttaatgtatgctaaatcaacgaattattgatatttatagatttgttgagaagacaatatctccttcaaacttagctttggaggagttattttttatgtcaaaattaaaaatgataaaaaataaagatatacataagaaaaaaccccttcaaagagactgagaatagtcaaatttttgaaggggtaaattcgatgttgatgtatttgttaaataaagaatccagcgattgcagctgaaatgaatgatactagtgttgcaccgaataatagtttcaaaccaaagcgggcaactgtatctccttttttgtcattaagtgatttaatcgcacctgaaataataccaatagagctaaagttagcaaatgatactaagaatacagatgtaacaccttttgcgtgttcagataaatcactaagtttaccaagtgcttgcattgctacaaattcgttagataatagttttgtcgccataactgaaccggcttgaactgcatcttgccatggcacaccgactaagaatgcaaatggtgcaaagacaaaaccaattaatgtttggaaatcccaagaaatagcgccacctgaaactgtactaaagatattgcttacaattccatttaatagagcgataatggcaatgtatccgattaacattgcgcctacaatgacagctactttaaatccatctaaaatatattctcctagcatttcgaagaatgattgttgtctttcttcagtttcttcaactaataatttgtcatcttcttcattaactttataagggttaataattgaagcgataatgaaaccaccaaataagtttaagacaacagccgttacaacatatttaggttcaattaaggtaaagtacgcaccgataattgaagcagatacagtcgacattgctgaagctgttaatgtgtataaacgttgcttaggtatgtatggtaattgttttttaattgaaataaatacttcagactgtcccaaaattgctgcagcaactgcattgtatgattctaaacgtcccataccattaattttagaaattaagaatcctaaaacattaatgattaaaggtaaaatctttgtgtattgaaggataccgataatcgctgaaataaatacgataggtaataatacactgaagaagaatggtggttgcttaggatcgatatattgaataccaccgaatacaaagttaacaccatctgcagcttttaataataagtagttaaaaccgtttgaaataccaccaataaccttgattcccattgtagttttaagcaagataaatgcaaagataagctgaattgcaagtaaaattcctacatatttccagcgaatatttttcctgtctgagctaaatagaaacgcaagtgctaaaaagaagataattccgataatcccaattagaatatgcatatatttctcattcctttagttttttctacaatctatcatacaataaaatggaagggctaacatcataaatttttgaaaatataaaaacaaattaattgaaaaaggtcaaaataggtcatataatatagtcaaagaaggtcaaaaaggggtgatatacatgcacaatatgtctgacatcatagaacaatacatcaaacgtttatttgaagagtcgaatgaggatgtcgttgaaattcagagagcgaatatcgcgcagcgttttgattgcgtaccatcacaattaaactatgtaatcaaaacacgattcactaatgaacatggttatgaaatcgaaagtaaacgtggtggtggtggttacatcagaatcactaaaattgaaaatagagatgcaacaggttatattaatcatttgcttcagctgattggaccttctatttctcaacaacaagcttattatattattgatgggcttttagataaaatgttaataaatgaacgtgaagctaaaatgattcaagcagttattgatagagaaacgctatcaatggatatggtttctagagatattattagagcaaatattttaaaacgtttgttaccagttataaattattactaaatgaaatgaggtgttgaagtgctttgtgaaaattgtcaacttaatgaagcggaattaaaagttaaaattacaagtaaaaataaaacagaagaaaaaatggtgtgtcaaacttgtgctgaggggcaccatccgtggaatcaagctaatgaacaacctgaatatcaagaacatcaagataatttcgaagaagcatttgttgttaagcaaattttacaacatttagctacgaaacatggcattaattttcaagaagtagcgtttaaagaagaaaaacgttgcccatcatgtcatatgactttgaaagatattgcacatgttggtaaatttggatgtgctaattgttatgcaacatttaaagatgacatcattgatatcgtccgcagagttcaaggtggacaatttgagcacgttggaaagacaccacattcttcacataaaaagatagctttaaagagaaaaatcgaagaaaagaatgaatatttgaaaaaacttattgaaatccaagattttgaggaagcggccattgttagagatgaaattaaagcactaaaagctgagagtgaggtgcaacatgatgacgcataatattcatgataatatcagccaatggatgaaaagtaatgaagaaacaccaattgttatgtcttctagaattcggttagcgcgtaatttagaaaatcatgtgcatccactaatgtatgctactgaaaatgatggatttagagttataaatgaggtacaagatgccttgccaaattttgaattaatgcgtcttgatcaaatggatcaacaaagtaaaatgaaaatggttgcaaagcatttgattagtcctgaactaataaaacaaccagcagccgcagtattagtgaatgatgatgaatctttaagtgtcatgataaatgaagaggaccatattcgtattcaagctatgggaactgacacgacattacaggctttatataatcaagcttcatcaattgatgatgaattagatcgaagccttgatataagttatgatgaacaacttggttatttaactacatgtcctaccaatataggtactggtatgagagcaagcgtgatgctacatttaccaggtctatctattatgaaaagaatgacacggattgctcaaaccattaatcgttttggatatacaatcagaggtatttacggtgaaggttcgcaagtttatggacatacttatcaagtatccaaccaacttacacttggtaaatctgagttagaaatcatagaaacattaacagaagttgttaatcaaatcattcatgaagaaaaacaaatacgacaaaagttagacacttataatcaattagaaacacaagaccgtgtttttcgctcgctaggtattttacaaaactgtagaatgataactatggaagaggcttcttatagattaagcgaagttaaacttggtatagatttaaattacattgaattacaaaactttaaatttaatgaattgatggtagctatacagtcaccatttttattagatgaagaagatgacaaatctgtaaaagaaaaacgagcagatatactaagagaacatataaagtaggaggtcattatttatgttatttggtagattaactgaacgtgcacagcgcgtattagcacatgcacaagaagaagcaattcgtttaaatcattcaaatataggaacagaacacctattattggggttaatgaaagaacctgaaggaattgctgcaaaagtattagaaagttttaatatcactgaagataaagtaattgaagaagttgaaaaattaatcggacatggtcaagatcatgttggtacattgcattatacacctagagctaaaaaagtcattgaattatcgatggatgaagctagaaaattacatcataattttgttggaacggaacatattttattaggcttgattcgtgaaaatgaaggtgttgcagcaagagtttttgcaaatctagatttaaatattactaaagcacgtgcacaagttgtgaaagctttaggcaaccctgaaatgagtaataaaaatgcacaagctagtaagtcaaataatactccaactttagatagtttagctcgtgacttaacagtcattgccaaagacggtacattagatcctgttataggacgtgataaagaaattacacgtgtaattgaagtattaagtagacgtacgaaaaacaatcctgtgcttattggagagccaggtgttggtaaaactgctattgctgaaggtttagcgcaagccatagtgaataatgaggtaccagagacattaaaagataagcgtgttatgtctttagatatgggaacagtagttgcaggtactaaatatcgtggtgaatttgaagagcgtctgaaaaaggttatggaagaaatccaacaagcaggtaatgtcatcctatttattgatgagttgcatactttagttggtgctggtggtgctgaaggtgctatcgatgcttcgaatattttgaaaccggcattagcacgtggtgaattacaatgtattggtgctactacattagatgaatatcgcaaaaatattgaaaaagacgcggctttagaacgtcgtttccaacctgtacaagttgatgaaccttcagtagtagatacagttgctattttaaaaggattaagagatcgttacgaagcacaccatcgtattaatatttcagacgaagctattgaagcagctgttaaattaagtaacagatacgtttcagatcgtttcttaccagataaagcaattgatttaattgatgaagcaagttctaaagtaagacttaagagtcatacgacacctaataatttaaaagaaattgaacaagaaattgaaaaagttaaaaatgaaaaagatgccgcagtacatgctcaagagtttgaaaatgctgctaatctgcgtgataaacaaacaaaacttgaaaagcaatatgaagaagctaaaaatgagtggaaaaacgcacaaaatggcatgtcaacttcattgtcagaagaagatattgctgaagtcattgcaggatggacaggtatcccattaactaaaatcaatgaaacagaatctgaaaaacttcttagtctagaagatgcattacatgagagagttattgggcaaaaagatgctgttaattcaatcagtaaagcggttagacgtgctcgtgcagggttaaaagatcctaaacgaccaattggtagctttatcttccttggaccaactggtgttggtaaaactgaattagctagagctttagctgaatcaatgtttggcgatgatgatgcgatgatccgtgtagacatgagtgaatttatggaaaaacacgcagtgagccgattagttggtgctcctccaggatatgttggtcatgatgatggtggacaattaactgaaaaagttagacgtaaaccatattctgtaattttatttgacgaaattgaaaaagcacatccggatgtatttaatattctattacaagttttagatgacggacatttgacagatacaaaaggacgtacagttgatttcagaaatacaattatcataatgacatcaaacgttggagcacaagaattacaagatcaacgatttgctggattcggtggttcaagtgatggacaagattatgaaacaatccgaaaaacaatgttgaaagaattgaaaaattcattccgcccagaattcttaaaccgtgttgatgatatcattgtattccataaattaacaaaagaagaattaaaagaaatcgtaacaatgatggttaataaattaacaaaccgattgtcagaacaaaatattaatattattgttactgataaagcgaaagataaaatcgctgaagaaggatatgatcctgaatatggtgcaagaccattaattagagcgatacaaaaaactatcgaagataatttaagtgaattaatattagatggtaatcaaattgaaggtaagaaagttacagtagatcatgatggtaaagagtttaaatatgacattgctgaacaaacttcagaaactaaaacatcatcgcaagcataattaaaaaacagtccaaaacaaattaaagttttgggctgttttttagtagcattgaactatagaaattcgtgaaagtatccaccaacgaaacaatctaataaaataatcatcaaaggatagttaagaattatatgaaacaagttaatgagcctacagcgatagcacaaaggtgtgaatttttataaaggttttttgtttgaagatactagcaacttacgtcaaaataaaataggtctatataatattgtgataaatctagagaaaagagtttactaagaaattattaagattttatctttgaaagataccgactatcaacatgatgtaagtttattttataatattcataaaaaataaatatgataaaacagtttgcgttagtagtcatgttaaaatacaaacaaatgtaactcacatttaatttgtcataatgggaatgtgcgtttaaaatagatttgttcaaaggaaagtggaggtgcaattttggccaagaaaaaagtgatttttgaatgtatggcttgtggttatcaatctcctaaatggatggggaaatgtcctaattgtggcgcttggaatcaaatggaggaaattgttgaaaaagcagccaatcctaaacatggagtgaaaaccaaagaattagcaggtaaagtacaaaaattaaatagtattaaacatgaaacaacgccgagagtattaacagattcagcagaattcaaccgtgtattaggtggaggtattgtgagtggatcgttagtacttattggtggggatccaggaattggtaagtcaacgttacttttacaaatttgtgcatcgttatctcaaaagaaaaaagtactatatattactggagaagaatcgcttagtcagactaaattacgtgcagagcgattagatgaagattcaagtgaattgcaagtattagctgaaacagatcttgaagttatttatcaaacagtaaaagaagaacaacctgatttactagtagtggattcgattcaaacaatatatcatcctgaaatcagctctgcgccaggttctgtttcacaagttcgtgaaagtacacaaagtttaatgaatattgctaaacaaatgaacattgcaacttttatagtgggtcatgtaacgaaagaaggtcaaattgctggcccaagattgctagaacacatggttgatactgtgctttattttgaaggcgatgaacaccacgcatatcgaattttgcgagctgttaaaaaccgttttggttcaacgaatgaaatgggaatcttcgaaatgaagcaaagtggattaaaaggtgtaaataatccatctgaaatgtttttagaagaacgttcaacaaatgttccaggttcaacaattgttgcaaccatggagggaaccaggccacttttaatagaagttcaagcgctggtaactccaacgacttttaacaatccgagacgaatggcaacagggattgatcataatcgattaagtttgttgatggctgttttggaaaagaaagaaaattatctattacaacaacaagatgcttatatcaaagtagctggcggtgtaaagttaacggagccagcagttgatttaagtgtaattgtagcaactgcgtctagctttaaagataaagctgtcgacggattagattgctatattggagaagttggtttaacgggtgaggtacgtcgtgtatctcggatagaacaacgcgtgcaagaggctgcaaaactaggtttcaaacgtgtaattattcctaaaaataatataggcggatggacatatcctgaaggtatacaagtaataggtgtaactactgtacatgaagcattgtcatttgctcttcattcataaaacatcaagaaaggaggacattgtgtgaatatcgttaaactaatggttattattatttacttaattattgggagcgcattaggaataattattattcctgaaattgcaaatgatcttggattacaaaactccagctttttaaaaaatcactatgtagatggcattatcggtagtatttttatgttcttaatttttggtgtatttattagacgagttactaacgctataaaaggtttagaacattttattatgcgtagaagtgctgttgaaatactattcgcaacaataggtttaataatcggattacttatttctgttatggtgtcgtttatattagaatcaattggcaactctatttttaatcatttcattcctgtcataattacgatattactatgttatttcggtttccaatttggccttaaaaaacgagatgaaatgttaatgtttttacctgagaatatagcgcgttccatgtcacaacatactaaaagtgctactccaaaaattatcgacacaagcgcaattattgacggacgtattttagaagtcattcgttgcggttttatcgatggcaatattttaattccacaaggtgttattaatgaattacaaattgttgcagattcaaatgacagtgttaaacgtgaaaagggtaaaagaggcttagatattttaaatgaattgtatgatttagattatcctacaaaagtcatacatccgactaaatcacatagtgatattgatacgatgttattaaagctagctaaacaatatcacgcaaatattataacgacagactttaatttgaataaagtttgtcatgtacatggtatcaaagcattaaatgttaatgatttatcagaagcaatcaaacctaatgttcatcaaggtgatcaactgcatattttactgacaaaaatgggtaaagagcctggtcaggcagtaggatatctagatgatggtacgatggtggttgttgataatgctaaaaatcttattggcagtcatgtcaatttagaagtagtcagcttattgcaaacatcttcaggaagaattgtttttgctaaaaaaatcgaagatacagtatcattataaaaactgtagttgacgaaaacaaaatagatattaaaaggtatatgaaatggcgaagtttgtaatttgaagtataactataactaaatacaaaacatatcagttatcaaaaaatgcaaatagtgctaatatatcattgaaacaagttcattaagtgttaaattttagatattaataaagttattcttatagcaatcgagacatacaaaattagaatcaattttaacgtatttgaatagttaatttgaagtttaattttacagcacataatattcatttttaagtcgttgaaatgcgtatgtagtgcagtcttgattcttagggatagcttttttaaagtgttgaaaaaacaactgctttctatttaaaatttaagcatattacccagggaattatgttatgattaaacaatgaaattattttaaggtcatgttaaaaagcattgtttcgttttaacaataagacgagttacacatttgttatgacggtcgaagatagcaaatgaacaatttatatgaactaacttgaaaatctgatatttaatttaggagtgaaaaaaatgagcgatcgtataagagtaagatatgcaccaagtccaactggttatcttcatattggtaatgcaagaacagcattattcaattacttgtatgctaaacattacaacggagattttgtgattcgaattgaagatactgataaaaaacgtaatttagaagatggagaaacatcacaatttgataatcttaaatggttaggattagattgggatgagtctgtagataaagacaatggctacggaccatatcgtcaatctgaacgtcaacatatctaccaaccattaatagatcagttactagcagaagataaagcatataaatgctatatgacagaagaagaattagaagctgaacgtgaagcgcaaatcgctcgtggtgaaatgcctcgctatggtggtcaacatgcgcatttgactgaagaacaacgtcaacaatttgaagcagaaggacgccaaccatcaattcgtttccgagtacctcaaaatcaaacgtattcatttgatgatatggttaaagggaatatttcatttgattcaaatggtattggtgactgggttatcgttaaaaaagatggcattccaacgtacaattttgcagtagctatagatgatcattacatggaaatttcagatgtcattcgtggtgatgatcatatttcaaacacgcctaaacaaattatgatttatgaagcatttggctgggagccacctcgttttggtcatatgtcattaattgttaatgaagaacgtaaaaagttaagtaaacgtgatgggcaaattttacaatttattgagcaatatcgtgacttaggttatttacctgaagcgttatttaattttattgcgttattaggttggtctcctgaaggtgaagaagaaatcttttctaaagaagaatttatcaaaatctttgatgaaaagcgtttgtcaaaatcaccagcatttttcgataagcaaaaattagcatgggttaataaccaatatatgaaacaaaaagatactgaaacagtattccaattagcattacctcatttaattaaagcgaatttgattcctgaggtgccgtcagaagaggatttatcttggggacgcaaattaattgcgctttatcaaaaagaaatgagttatgccggtgaaattgtacctttatcagaaatgttctttaaagaaatgccagctcttggtgaggaagaacaacaagtgatcaatggagagcaagtaccagagttaatgatgcacttattcagtaaattagaagcacttgaaccatttgaagcggctgaaattaaaaagacaattaaagaagttcaaaaagaaacaggaataaaaggcaagcaattatttatgcctattcgtgttgctgtaacaggccaaatgcatggtcctgaattaccaaatacaattgaagtacttggtaaagaaaaagtgctaaaccgtttaaaacaatataagtaatgaaatagacaagatcaaggtagtatatacttgaattttataacgtaaccacatatgataaagttgtattaacaaattacaacaatatgaatagagtattttataaaaaacgaaggattagtaattaaatttatacgatgcagagagtgtacggttgctgtgagtacaacgtagaaattaatgaatgcaccttcgtaaaatgaattaaatatataatgagagtgatgagcattaagttgactaagtttccttgataatttggaagcgcccgcaattttattaatgtaattcgctaaattcagagtggaaccgtgcggaagcgcctctaacaatacaatttgtatgttagtggtgctttttttgatatttaatttcgcaggtacttcaattatgtatttacgtagttcaatcattgaggaggaaatgatcttgttaaaaagaatgagagacgatataaaaatggtatttgagcaggatccagcggcacgttcaacattagaagtcattacaacgtatgcaggtttacatgcagtttggagtcatttgattgcacataagttatacaaccaaaaaaaatatgttgcagcacgcgcgatatctcaaatttcaagatttttcacaggtatagaaatccatccaggtgctaaaattggaaagcgtctatttatagatcatggtatgggcgttgtaataggagaaacatgtacaattggtgataatgtgacaatctatcaaggcgtgacacttggtgggacagggaaagaaagagggaaaagacacccagatataggagacaatgttttaatagcagcgggtgcgaaagttttaggaaatattaaaataaattcaaatgtaaatattggtgcaaattcagttgttttacaatcagttccaagttattcaacggttgttggtataccaggacatattgttaagcaagatggtgttcgagttggaaaaacatttgatcatcgccatctacctgatccaatttatgaacaaattaagcatttagaacgacaacttgaaaagactaggaatggagagattcaagatgattacattatataatacgcttacacgtcaaaaagaagtgttcaagccaatagagccaggaaaagtaaaaatgtatgtatgtggtcctactgtatataactacattcatattggtaacgcgagaccagcaattaattatgacgtagtgagacgttactttgaataccaaggatataatgtagaatatgtatcaaattttacagatgtagatgataaattaattaaacgttctcaagaattaaatcagtctgttcccgaaattgcagaaaaatatattgctgcttttcatgaagatgttggtgcgttaaatgttagaaaagcgacttcaaatccaagggtaatggaccatatgaatgacattattcaatttattaaagatttggttgatcaaggttatgcatatgaaagtggtggcgatgtttactttagaacacgtaaatttgaaggttatggtaaattaagtcatcaatccatagatgacttaaaagtgggtgctcgtatagatgcaggagagcataaggaagatgcacttgattttacattgtggaaaaaagcgaagcctggcgagattagttgggatagcccatttggtgaaggaagaccaggatggcatattgaatgttctgtaatggcatttcatgagctaggacctacaattgatatacatgcgggtggttcagatttacaatttccacatcatgaaaatgaaatagcacaatcggaagcacataatcatgcgccattcgctaattattggatgcataatggtttcattaatattgataatgaaaaaatgagtaaatcactaggcaactttattttagttcacgatattattaaagaaattgatccagatgtattaagattctttatgattagcgtacattatagaagtccaattaactataatctagaattggttgaatcagcacgtagtggattagagcgtattcgcaatagttatcaattaattgaagagcgcgcacaaattgctactaatattgaaaatcaacaagcatatattgatcaaattgatgcgattttaaatcgttttgaaacagttatgaatgatgattttaatacagctaatgcaattacagcttggtatgatttagcaaaacttgcaaataaatatgtactagagaacacaacatcaacagaagtaattgataaatttaaagcagtttatcaaatttttagcgatgttttaggtgtaccgttaaaatctaaaaatgcagatgaattattggatgaagatgttgaaaaattaatcgaagagcgtaatgaagcaaggaaaaacaaagattttgcacgagcagatgagattcgagacatgctgaaatcacaaaacattatattagaagacacacctcaaggggttagatttaaacgtggataatcaacaagataatcacattaaattattgaatccattgaccttagcatatatgggagacgcagtcttagatcaatatgtacgtacgtatatcgttttaaagcttaaaagtaagcctaataaactacatcaaatgtctaaaaaatatgtatctgccaaaagtcaggcgcaaacgttagaatatttaatggagaaagaatggtttacagacgaagaaatggatattttgaagcgagggcgtaacgcgaaaagtcatactaaagctaaaaatactgatgttcaaacatatcgtaaaagttcagcgatagaagcagtgataggttttctttatttagaaaaaagagaagaacgattagaggcattattaaatgaaataataacaatagtaaacgaaaggtagtgacaatgtggaagatacggttattgttggtaggcatgctgttagagaagcgattattactgggcatccgataaataagatattgattcaagaaggaattaaaaagcaacaaattaatgaaattttaaaaaatgcaaaagatcaaaaaatcattgttcaaactgtaccaaaatctaaattagattttttagcaaatgcaccacatcagggggttgcagcgcttattgcaccatatgaatatgctgacttcgatcaatttttaaaacagcaaaaagaaaaagaaggtttatcgacagtacttatattagacggcttagaagatccgcataacttgggatcaattttaagaacagcagatgcaacgggagttgatggtgttattattcctaaacgtcgttcagttacactaacgcaaacagttgcaaaagcctcaacaggtgcaattgaacatgtaccagttattcgagtgacaaatttagctaaaactatcgatgaactaaaagataatggcttttgggtagctggcactgaagctaataatgcaacagattatagaaatcttgaagcggacatgtcattggctattgtaattggtagcgaaggacagggtatgagtcgcctggtaagtgataaatgcgatttttatattaagattccaatggttggacatgtaaacagtttgaatgcttcggttgcagcaagtttaatgatgtacgaagtatttcgaaaaagacatgatgttggagaaatataatgaaagaacgttacttaatcattgatggatacaatatgataggacaatcaccaacgctaaacgccattgcaaaagagaatttagaagaagctagaatgcaattaatagatgcaattgcaaattataatgcagttatttcagatgaaattatttgtgttttcgatgcttatgaccaatcgggtgttgaaagagaatacatgtatcatggcgttaaaacgatttttaccaaggaaaaagaaacagctgatagtttcatagaacgttatgtctatgaactttatgacaagcacactaagcatattacagttgtaacaagtgatatgagtgagcaacatgctatctttggatcaggtgcatatagaatatcatctcgcgaaatgtggagagacttaaaagaaaatgaaattgatgtgagtaaatcattagatgatataagtgaaaacaagccaagaactcgaattccgttatcttctgaaatccttgcagaatttgaaaaaatacgaagaggacatcataagaaatgacatttccgtcatcttgaaattttgaatgtaacaatattaaactaaccttaaattttagatagaaggggttagtttaatacttgaaatatgatttgacaactcaagatagtacaatcaaacgtaacaatgcaataaatgataaagacttcgaaaagttagtaatggatctacaaccattaattattcgacgcatcaaaacatttggatttaatcattatgatttagaagacttatatcaagaaatacttatacggatgtataggtcggtccaaacatttgattttagtggagagcagcctttcacaaattatgttcaatgtttaattacgtctgtaaagtatgattatttgagaaaatatttagctacaaataaaagaatggataatttgattaatgaatatagagttacgtatccatgtgtaataaagcgttatgatgttgaaaacaattatttgaataaattagcaattaaagagttgattcgtcagtttaagtatttgagtgcatttgaaaaagatgtcatgtatttaatgtgtgaacaatataagccgagagaaattgctcaactgatgcatgtaaaagagaaagtgatttataatgccatacaacgatgtaaaaataaaataaaacgttatttcaaaatgatttgaaaagcgccttaggacgtgaattgaattagaacgtgttacttcttgatggtttgacatttgttataaattttatgtatagtatactggtattataatgaataaaggtgaattattgtgaggaaaatacctttaaattgtgaagcttgtggcaatagaaattataatgttcctaagcaagaaggctcggcaacaagattaaccttaaagaaatattgtccaaaatgtaacgcgcacacaattcataaagaatcgaaataaatacattcgaaataatactttgataatatgttcaaaggatttggaggttgagcagatggctaaaaaagaaagtttctttaaaggcgttaagtctgaaatggaaaaaacaagttggccgacgaaagaagagctatttaaatatactgtaattgtagtttctactgttatattcttcttagtctttttctatgccttagatttaggaattacagcattgaaaaatttattatttggttagaggagtgaagacatgtctgaagaagttggcgcaaagcgttggtatgcagtgcatacatattctggatatgaaaataaagttaaaaagaatttagaaaaaagagtagaatctatgaatatgactgaacaaatctttagagtagtcataccggaagaagaagaaactcaagtaaaagatggcaaagctaaaacgactgttaaaaaaacattccctggatatgttttagtggaattaatcatgacagatgaatcatggtatgtggtaagaaatacaccaggcgttactggttttgtaggttctgcaggtgcagggtctaagccgaatccattgttaccagaagaagttcgcttcatcttaaaacaaatgggtcttaaagaaaagactatcgatgttgaactcgaagttggcgagcaagttcgtattaaatcaggtccatttgcgaatcaagttggtgaagttcaagaaattgaaacagataagtttaagctaacagtattagtagatatgtttggccgagaaacaccagtagaagttgaattcgatcaaatagaaaagctttaattaacaattaaagttattaaactaaccaaaagataaaaaagagtattgattttttaattagaaaagtgttaaaattatgtggtcgcgcttttagagcgcccatttcgtcacgaaatgttaagagtgggagggcaaaactgagccctgtgaccacatcacgatatcaaggaggtgcacatcgtggctaaaaaagtagataaagttgttaaattacaaattcctgcaggtaaagcgaatccagcaccaccagttggtccagcattaggtcaagcaggtgtgaacatcatgggattctgtaaagagttcaatgcacgtactcaagatcaagcaggtttaattattccggtagaaatcagtgtttatgaagatcgttcatttacatttattacaaaaactccaccggctccagtattacttaaaaaagcagctggtattgaaaaaggttcaggtgaaccaaacaaaactaaagttgctacagtaactaaagatcaagtacgcgaaattgctaacagcaaaatgcaagacttaaacgctgctgacgaagaagcagctatgcgtattatcgaaggtactgcacgtagtatgggtatcgttgtagaataattttacgaatattaaatttgattacatgatttaaacgatgaagcagataacagagataataatgatgaattataaatataatctgaatgactagattaatgattgatttattcataagattaattcttctgttgtctgctcttaacttgcatctagcaagtaatgtgggaggaaattccgctaaaaccactaaaggaggaactataaatggctaaaaaaggtaaaaagtatcaagaagcagctagtaaagttgaccgtactcagcactacagtgttgaagaagcaattaaattagctaaagaaacaagcattgctaactttgacgcttctgttgaagttgcattccgtttaggaattgatacacgtaaaaatgaccaacaaatccgtggtgcagttgtattaccaaacggaactggtaaatcacaaagtgtattagtattcgctaaaggtgacaaaattgctgaagctgaagcagcaggtgctgactatgtaggtgaagcagaatacgttcaaaaaatccaacaaggttggttcgacttcgatgtagtagttgctacaccagacatgatgggtgaagttggtaaattaggtcgtgtattaggaccaaaaggtttaatgccaaaccctaaaactggaactgtaacaatggatgttaaaaaagctgttgaagaaatcaaagctggtaaagtagaataccgcgctgaaaaagctggtatcgtacatgcatcaattggtaaagtttcatttactgatgaacaattaattgaaaacttcaatactttacaagatgtattagctaaagctaaaccatcatctgctaaaggtacatacttcaaatctgttgctgtaactacaacaatgggtcctggagttaaaattgatactgcaagtttcaaataataaatgatataaacaattacaggctgaaagaaatatctttcagtctgtaaaaatatattgacaataagtaatttccaagttatattacttattgtgattattttacctaagacagtaggagttatttataacttaaaatttatcctaccgaggctaaaattgacttgaacgtgatgatctatgatctttcaagcactttttgccgtgggtagaaagtgctttttttattaattttaaaaaaagcaccaaaaatttaaatggaggtgtctgaatgtctgctatcattgaagctaaaaaacaactagttgatgaaattgctgaggtactatcaaattcagtttcaacagtaatcgttgactaccgtggattaacagtagctgaagttactgacttacgttcacaattacgtgaagctggtgttgagtataaagtatacaaaaacactatggtacgtcgtgcagctgaaaaagctggtatcgaaggcttagatgaattcttaacaggtcctactgccattgcaacttcaagtgaagatgctgtagctgcagcgaaagtaatttctggatttgctaaagatcatgaagcattagaaattaaatcaggcgttatggaaggcaatgttattacagcagaagaagttaaaactgttggttcattaccttcacacgatggtcttgtatctatgcttttatcagtattacaagctcctgtacgcaacttcgcttatgcggttaaagctattggagaacaaaaagaagaaaacgctgaataatttttagcgtaaaaaaattaaaaataatggaggaattataaaatggctaatcatgaacaaatcattgaagcgattaaagaaatgtcagtattagaattaaacgacttagtaaaagcaattgaagaagaatttggtgtaactgcagctgctccagtagcagtagcaggtgcagctggtggcgctgacgctgcagcagaaaaaactgaatttgacgttgagttaacttcagctggttcatctaaaatcaaagttgttaaagctgttaaagaagcaactggtttaggattaaaagatgctaaagaattagtagacggagctcctaaagtaatcaaagaagctttacctaaagaagaagctgaaaaacttaaagaacaattagaagaagttggagctactgtagaattaaaataattcaagtatcttaaacttaataatcaaagttttatagcaagtattgctataatataatgattctttgagaagttaaaaccccgttattttgataacggggttttattcatttaaagactgagtgaaatgttataattataatgacgagttacaaagtgaagatgaggtggaataatgagtcattattatgatgaagatccaagtgtaattagcaatgaacaacgtattcaatatcaattaaagcatcataaaattgatttaataactgataacggagtgttttcgaaagataaagtagattatggttcagatgttcttgttcaaacttttttaaaaacgcatccacctggtccaagtaagcgaattgccgatgttggttgtggttacggaccaattggtttgatgattgctaaagtatcaccacatcattcaattacaatgctagatgttaatcacagagcgctagccttagttgaaaaaaataaaaaattaaacggtattgataatgtgatcgtaaaggaaagtgatgctttgtctgctgtggaagacaaaagttttgattttattttaaccaatccaccaataagagcagggaaagaaaccgtgcatcgcatattcgagcaagcattacatagattagactcgaacggtgaactattcgtggtaattcagaagaagcaaggtatgccatctgcaaagaaaagaatgaatgaactttttggaaatgtagaagtggtaaataaagataaaggatattacattctgagaagcataaaagcttgaaatgaaatggatattctgttatagttatataatgtaaaaatttatgttcaataagtgtgtacttttacgttaaatagataagttaattaagaataaatatagaatcgaaaatggtgtcatcattagtgttgccgttttctttttgtctttttattaatatgcttatggtatttagctaaaagcggatcacataatttttgaggggtgaatctgtttggcaggtcaagttgtccaatatggaagacatcgtaaacgtagaaactacgcgagaatttcagaagtattagaattaccaaacttaatagaaattcaaactaaatcttacgagtggttcctaagagaaggtttaatcgaaatgtttagagacatttctccaattgaagattttactggtaatttgtcattagagtttgtggattaccgtttaggagaaccaaaatatgatttagaagaatctaaaaaccgtgacgctacttatgctgcacctcttcgtgtaaaagtgcgtctaatcattaaagaaacaggagaagttaaagaacaagaagtctttatgggtgatttcccattaatgactgatacaggtacgttcgttatcaatggtgcagaacgtgtaatcgtatctcaattagttcgttcaccatccgtttatttcaatgaaaaaatcgacaaaaatggtcgtgaaaactatgatgcaacaattattccaaaccgtggtgcatggttagaatatgaaacagatgctaaagatgttgtatacgtgcgtattgatagaacacgtaaactaccattaacagtattgttacgtgcattaggtttctcaagtgaccaagaaattgttgaccttttaggtgacaatgaatatttacgtaatactttagagaaagacggcactgaaaacactgaacaagcgttattagaaatctatgaacgtttacgtccaggtgaaccaccaactgttgaaaatgctaaaagtctattgtattcacgtttctttgatccaaaacgctatgacttagcaagcgtgggtcgttataaaacaaacaaaaaattacatttaaaacatcgtttattcaatcaaaaattagctgagccaattgtgaatactgaaactggtgaaattgtagttgaagaaggtacagtgcttgatcgtcgtaaaatcgacgaaatcatgaatgtacttgaatcaaacgcaaacagcgaagtgtttgaattgcatggtagcgtaatagacgagccagtagaaattcaatcaattaaagtatatgttcctaacgatgatgaaggtcgtacgacaactgtaattggtaatgctttccctgactcagaagttaaatgtattacaccagcagatatcattgcttcaatgagttacttctttaacttattaagcggtattggatatacagatgatattgaccatttaggtaaccgtcgtttacgttctgtaggtgaattactacaaaaccaattccgtatcggtttatcaagaatggaaagagttgtacgtgaaagaatgtcaattcaagatactgagtctatcacacctcaacaattaattaatattcgacctgttattgcatctattaaagaattctttggtagctctcaattatcacaattcatggaccaagcaaatccattagctgagttaacgcataaacgtcgtctatcagcattaggacctggtggtttaacacgtgaacgtgctcaaatggaagtgcgtgacgttcactactctcactatggccgtatgtgtccaattgaaacacctgagggaccaaacattggattgattaactcattatcaagttatgcacgtgtaaatgaattcggctttattgaaacaccatatcgtaaagttgatttagatacacatgctatcactgatcaaattgactatttaacagctgacgaagaagatagctatgttgtagcacaagcaaactctaaattagatgaaaatggtcgtttcatggatgatgaagttgtatgtcgtttccgtggtaacaatacagtgatggctaaagaaaaaatggattatatggatgtatcgccgaagcaagttgtttcagcagcgacagcatgtattccattcttagaaaatgatgactcaaaccgtgcattgatgggtgcgaacatgcaacgtcaagcagtgcctttgatgaatccagaagcaccatttgttggcacaggtatggaacacgttgcagctcgtgattctggtgcagctattacagctaagcacagaggtcgcgttgaacatgttgaatctaatgaaattcttgtacgtcgtctagttgaagagaacggcgttgagcatgaaggtgaattagatcgctatccattagctaaatttaaacgttcaaactcaggtacatgttacaaccaacgtccaatcgttgcagttggagatgttgttgagtataacgagattttagcagatggaccatctatggaattaggagaaatggcattaggtagaaacgtagtagttggtttcatgacttgggacggatacaactatgaggatgccgttatcatgagtgaaagacttgtgaaagatgacgtgtatacttctattcatattgaagagtatgaatcagaagcacgtgatactaagttaggacctgaagaaatcacaagagatattcctaatgtttctgaaagtgcacttaagaacttagacgatcgtggtatcgtttatattggtgcagaagtaaaagatggagatattttagttggtaaagtaacgcctaaaggtgtaactgagttaactgccgaagaaagattgttacacgcaatctttggtgaaaaagcacgtgaagttagagatacttcattacgtgtacctcacggcgctggcggtatcgttcttgatgtaaaagtattcaatcgcgaagaaggcgacgatacattatcacctggtgtaaaccaattagtacgtgtatatatcgttcaaaaacgtaaaattcacgttggtgataagatgtgtggtcgacatggtaacaaaggtgtcatttctaagattgttcctgaagaagatatgccttacttaccagacggacgtccgatcgatatcatgttaaaccctcttggtgtaccatctcgtatgaacatcggacaagtattagagctacacttaggtatggctgctaaaaatctaggtattcatgttgcatcaccagtatttgacggtgcaaacgatgacgatgtatggtcaacaattgaagaagctggtatggctcgtgatggtaaaactgtactttatgatggacgtacaggtgaaccatttgataaccgtatttcagtaggtgtaatgtacatgttgaaacttgcgcacatggttgatgataaattacatgcgcgttcaacaggaccatattcacttgttacacaacaaccacttggcggtaaagcgcaattcggtggacaacgtttcggtgagatggaggtatgggcacttgaagcatatggtgctgcatacacattacaagaaatcttaacttacaaatccgatgatacagtaggacgtgtgaaaacatacgaggctattgttaaaggtgaaaacatctctagaccaagtgttccagaatcattccgagtattgatgaaagaattacaaagtttaggtttagatgtaaaagttatggatgagcaagataatgaaatcgaaatgacagacgttgatgacgatgatgttgtagaacgcaaagtagatttacaacaaaatgatgctcctgaaacacaaaaagaagttactgattaatacgcaatttacaaaacaggcaaaaagatactaagctgaattttattgatgattcagtttagtactttaagccattttaaaaaaatgcaaatcaatcaaatagcacagctaatctaaattgaaggaggtaggctccttgattgatgtaaataatttccattatatgaaaataggattggcttcacctgaaaaaatccgttcttggtcttttggtgaagttaaaaaacctgaaacaatcaactaccgtacattaaaacctgaaaaagatggtctattctgtgaaagaattttcggacctacaaaagactgggaatgtagttgtggtaaatacaaacgtgttcgctacaaaggcatggtctgtgacagatgtggagttgaagtaactaaatctaaagtacgtcgtgaaagaatgggtcacattgaacttgctgctccagtttctcacatttggtatttcaaaggtataccaagtcgtatgggattattacttgacatgtcaccaagagcattagaagaagttatttacttcgcttcttatgttgttgtagatccaggtccaactggtttagaaaagaaaactttattatctgaagctgaattcagagattattatgataaatacccaggtcaattcgttgcaaaaatgggtgcagaaggtattaaaaatttacttgaagagattgatcttgacgaagaacttaaattgttacgtgatgagttggaatcagctactggtcaaagacttactcgtgcaattaaacgtttagaagttgttgaatcattccgtaattcaggtaacaaaccttcatggatgattttagatgtacttccaatcatcccaccagaaattcgtccaatggttcaattagatggtggacgatttgcaacaagtgacttaaacgacttataccgtcgtgtaattaatcgaaataatcgtttaaaacgtttattagatttaggtgcacctggtatcatcgttcaaaacgaaaaacgtatgttacaagaagccgttgacgctttaattgataatggtcgtcgtggtcgtccagttactggcccaggtaaccgtccattaaaatctttatcacatatgttaaaaggtaaacaaggtcgtttccgtcaaaacttacttggtaaacgtgttgactattcaggacgttcagttatcgcggtaggtccaagcttgaaaatgtatcaatgtggtttgccaaaagaaatggcacttgaactatttaaaccattcgtaatgaaagaattagttcaacgtgaaattgcaactaacattaaaaatgcgaagagtaaaatcgaacgcatggatgatgaagtttgggacgtattggaagaagtaattagagaacatcctgtattacttaaccgtgcaccaacacttcatagacttggtattcaagcatttgaaccaactttagttgaaggtcgtgcgattcgtttacatccacttgtaacaacagcttataacgctgactttgatggtgaccaaatggcggttcacgttcctttatcaaaagaggcacaagctgaagcaagaatgttgatgttagcagcacaaaacatcttgaaccctaaagatggtaaaccagtagttacaccatcacaagatatggtacttggtaactattaccttactttagaaagaaaagatgcagtaaatacaggcgcaatctttaataatacaaatgaagtattaaaagcatatgcaaatggctttgtacatttacacacaagaattggtgtacatgcaagttcattcaacaatccaacatttactgaagaacaaaacaaaaagattcttgctacgtcagtaggtaaaattatatttaatgaaatcattccagattcatttgcttatattaatgaacctacgcaagaaaacttagaaagaaagacaccaaacagatatttcatcgatcctacaactttaggtgaaggtggattaaaagaatactttgaaaatgaagaattaattgaacctttcaacaaaaaattcttaggtaatattattgcagaagtattcaacagatttagcatcactgatacatcaatgatgttagaccgtatgaaagacttaggattcaaattctcatctaaagctggtattacagtaggtgttgctgatatcgtagtattacctgataagcaacaaatacttgatgagcatgaaaaattagtcgacagaattacaaaacaattcaatcgtggtttaatcactgaagaagaaagatataatgcagttgttgaaatttggacagatgcaaaagatcaaattcaaggtgaattgatgcaatcacttgataaaactaacccaatctttatgatgagtgattcaggtgcccgtggtaacgcatctaactttacacagttagcaggtatgcgtggattgatggccgcaccatctggtaagattatcgaattaccaatcacatcttcattccgtgaaggtttaacagtacttgaatacttcatctcaactcacggtgcacgtaaaggtcttgccgatacagcacttaaaacagctgactcaggatatcttactcgtcgtcttgttgacgtggcacaagatgttattgttcgtgaagaagactgtggtactgatagaggtttattagtttctgatattaaagaaggtacagaaatgattgaaccatttatcgaacgtattgaaggtcgttattctaaagaaacaattcgtcatcctgaaactgatgaaataatcattcgtcctgatgaattaattacacctgaaattgctaagaaaattacagatgctggtattgaacaaatgtatattcgctcagcatttacttgtaacgcacgccatggtgtttgtgaaaaatgttacggtaaaaaccttgctactggtgaaaaagttgaagttggtgaagcagttggtacaattgcagcccaatctatcggtgaaccaggtacacagcttacaatgcgtacattccatacaggtggggtagcaggtagcgatatcacacaaggtcttcctcgtattcaagagattttcgaagcacgtaaccctaaaggtcaagcggtaattactgaaatcgaaggtgtcgtagaagatattaaattagcaaaagatagacaacaagaaatcgttgttaaaggtgctaatgaaacaagatcataccttgcttcaggtacttcaagaattattgtagaaataggtcaaccagttcaacgtggtgaagtattaactgaaggttctattgaacctaagaattacttatcagttgctggattaaacgcgacagaaagctacttattaaaagaagtacaaaaagtttatcgtatgcaaggggtagaaatcgacgataaacacgttgaggttatggttcgacaaatgttacgtaaagttagaattatcgaagcaggtgatacgaagttattaccaggttcattagttgatattcataactttacagatgcaaatagagaagcatttaaacaccgtaagcgtcctgcaacagctaaaccagtattacttggtattactaaagcatcacttgaaacagaaagtttcttatctgcagcatcattccaagaaacaacaagagttcttacagatgcagcaattaaaggtaagcgtgatgacttattaggtcttaaagaaaacgtaattattggtaagttaattccagctggtactggtatgagacgttatagcgacgtaaaatacgaaaaaacagctaaaccagttgcagaagttgaatctcaaactgaagtaacggaataataagtatataacagaggctaaggctttagcctcttgttatttttatgtaaattatttgatttaatgttgacgaattctcttgttcaatgttaatatattaaaggttgatgcaagcagaactttggaggataagttattgtctaaggaaaaagttgcacgctttaacaaacaacattttgtagttggtcttaaagaaacgcttaaagcgttaaagaaagatcaagttacatctttgattattgctgaggacgttgaagtatatttaatgactcgcgtgttaagccaaatcaatcagaaaaatatacctgtatcttttttcaaaagcaaacatgctttgggtaaacatgtaggtattaacgtcaatgcgacaatagtagcattgattaaatgagaattagtaagtgttttacttactaaattttatttaacctaaaaatgaaccacctggatgtgtgggattaaaaagtgaagagaggaggacatatcacatgccaactattaaccaattagtacgtaaaccaagacaaagcaaaatcaaaaaatcagattctccagctttaaataaaggtttcaacagtaaaaagaaaaaatttactgacttaaactcaccacaaaaacgtggtgtatgtactcgtgtaggtacaatgacacctaaaaaacctaactcagcgttacgtaaatatgcacgtgtgcgtttatcaaacaacatcgaaattaacgcatacatccctggtatcggacataacttacaagaacacagtgttgtacttgtacgtggtggacgtgtaaaagacttaccaggtgtgcgttaccatattgtacgtggagcacttgatacttcaggtgttgacggacgtagacaaggtcgttcattatacggaactaagaaacctaaaaactaagaatttagtttttaattaaatcttaaacttaaaatatttaatataaggaagggaggatttacattatgcctcgtaaaggatcagtacctaaaagagacgtattaccagatccaattcataactctaagttagtaactaaattaattaacaaaattatgttagatggtaaacgtggaacagcacaaagaattctttattcagcattcgacctagttgaacaacgcagtggtcgtgatgcattagaagtattcgaagaagcaatcaacaacattatgccagtattagaagttaaagctcgtcgtgtaggtggttctaactatcaagtacctgtagaagttcgtccagaacgtcgtactactttaggtttacgttggttagttaactatgcacgtcttcgtggtgaaaaaacgatggaagatcgtttagctaacgaaattttagatgcagcaaataatacaggtggtgccgttaagaaacgtgaggacactcacaaaatggctgaagcaaacaaagcatttgctcactaccgttggtaagataaaagcttttaccctgagtgtgttctatattaatgaattttcattaagcgttcatgcttagggcatcgccatatctatcgtatttattcagtaatataaactggaaggagaaaaaatacatggctagagaattttcattagaaaaaactcgtaatatcggtatcatggctcacattgatgctggtaaaacgactacgactgaacgtattctttattacactggccgtatccacaaaattggtgaaacacacgaaggtgcttcacaaatggactggatggagcaagaacaagaccgtggtattactatcacatctgctgcaacaacagcagcttgggaaggtcaccgtgtaaacattatcgatacacctggacacgtagacttcactgtagaagttgaacgttcattacgtgtacttgacggagcagttacagtacttgatgcacaatcaggtgttgaacctcaaactgaaacagtttggcgtcaggctacaacttatggtgttccacgtatcgtatttgtaaacaaaatggacaaattaggtgctaacttcgaatactctgtaagtacattacatgatcgtttacaagctaacgctgctccaatccaattaccaattggtgcggaagacgaattcgaagcaatcattgacttagttgaaatgaaatgtttcaaatatacaaatgatttaggtactgaaattgaagaaattgaaattcctgaagatcacttagatagagctgaagaagctcgtgctagcttaatcgaagcagttgcagaaactagcgacgaattaatggaaaaatatcttggtgacgaagaaatttcagtttctgaattaaaagaagctatccgccaagctactactaacgtagaattctacccggtactttgtggtacagctttcaaaaacaaaggtgttcaattaatgcttgacgctgtaattgattacttaccttcaccactagacgttaaaccaattattggtcaccgtgctagcaaccctgaagaagaagtaattgcgaaagcagacgattcagctgaatttgctgctttagcgttcaaagttatgactgacccttatgttggtaagttaacattcttccgtgtgtactcaggtacaatgacatctggttcatacgttaagaactcaactaaaggtaaacgtgaacgtgtaggtcgtttattacaaatgcacgctaactcacgtcaagaaatcgatactgtatactctggagatatcgctgctgcggtaggtcttaaagatacaggtactggtgatactttatgtggtgagaaaaatgacattatcttggaatcaatggaattcccagagccagttattcacttatcagtagagccaaaatctaaagctgaccaagataaaatgactcaagctttagttaaattacaagaagaagacccaacattccatgcacacactgacgaagaaactggacaagttatcatcggtggtatgggtgagcttcacttagacatcttagtagaccgtatgaagaaagaattcaacgttgaatgtaacgtaggtgctccaatggtttcatatcgtgaaacattcaaatcatctgcacaagttcaaggtaaattctctcgtcaatctggtggtcgtggtcaatacggtgatgttcacattgaattcacaccaaacgaaacaggcgcaggtttcgaattcgaaaacgctatcgttggtggtgtagttcctcgtgaatacattccatcagtagaagctggtcttaaagatgctatggaaaatggtgtcttagcaggttatccattaattgatgttaaagctaaattatatgatggttcataccatgatgtcgattcatctgaaatggccttcaaaattgctgcatcattagcacttaaagaagctgctaaaaaatgtgatcctgtaatcttagaaccaatgatgaaagtaactattgaaatgcctgaagagtacatgggtgatatcatgggtgacgtaacatctcgtcgtggacgtgttgatggtatggaacctcgtggtaatgcacaagttgttaatgcttatgtaccactttcagaaatgttcggttatgcaacatcattacgttctaacactcaaggtcgcggtacttacactatgtacttcgatcactacgctgaagttccaaaatcaatcgctgaagatattatcaagaaaaataaaggtgaataatataacttgttttgactagctagcctaggttaaaatacaaggtgagcttaattctaagctatcatctttatagtttgattttttggggtgaatgcattataaaagaattgtaaaattctttttgcaatcgctataaatgatcttctcatgatggtgagaaactatcatgagagataaatttaaatattatttttaattagaataggagagattttataatggcaaaagaaaaatttgatcgttctaaagaacatgccaatatcggtactatcggtcacgttgaccatggtaaaactactttaacagcagctatcgctactgtattagctaaaaatggtgactcagttgcacaatcatatgacatgattgacaacgctccagaagaaaaagaacgtggtatcacaatcaatacttctcatattgagtaccaaactgacaaacgtcactatgctcacgttgactgcccaggacacgctgactacgttaaaaacatgatcactggtgctgctcaaatggacggtggtatcttagtagtatctgctgctgacggtccaatgccacaaactcgtgaacacattcttttatcacgtaacgttggtgtaccagcattagtagtattcttaaacaaagttgacatggttgacgatgaagaattattagaattagtagaaatggaagttcgtgacttattaagcgaatatgacttcccaggtgacgacgtacctgtaatcgctggttcagctttaaaagctttagaaggcgatgctaaatacgaagaaaaaatcttagaattaatggaagctgtagatacttacattccaactccagaacgtgattctgacaaaccattcatgatgccagttgaggacgtattctcaatcactggtcgtggtactgttgctacaggccgtgttgaacgtggtcaaatcaaagttggtgaagaagttgaaatcatcggtttacatgacacatctaaaacaactgttacaggtgttgaaatgttccgtaaattattagactacgctgaagctggtgacaacatcggtgcattattacgtggtgttgctcgtgaagacgtacaacgtggtcaagtattagctgctcctggttcaattacaccacatactgaattcaaagcagaagtttacgtattatcaaaagacgaaggtggacgtcacactccattcttctcaaactatcgtccacaattctatttccgtactactgacgtaactggtgttgtacacttaccagaaggtactgaaatggtaatgcctggtgataacgttgaaatgacagtagaattaatcgctcctatcgcgattgaagacggtactcgtttctcaatccgtgaaggtggacgtactgtaggatcaggcgttgttactgaaatcattaaataatttctaatttcttagattttatataaaaagaagatccctcaatcgaggggtcttttttttaatgtgtaaattttgtaatggctattcgatttagaagaacaataattgatgaaagtctgactaataaaacttataactgataatactgtttaaataaaattgtagagtcttgaacattgtaaaatgctccattcaaagttttcattttttcaatgtctactttgaatggagcatttcattagtttatgtctcagattcatgtctttcaattaatttaatacttaatttgttttaaatacttgctctaattcaatgatttttaaaaatacagctacagcgtattttaatgatttttcatcaatatcaaatttgggattatggtgtggcgctgtaatacctttactttcattaccacaaccagtcagaaagaatgcacctggtcgtactttcaaataatgtgaaaaatcttctccaatcatcattaaatctgattcattaaagcgtacatgtaagtcatttgttgcttctttaataacttgatatgctttctcgttgttatggacaggcaaataccctttaatataattcaaatcgtagttaatatcatttgctattgctaaaccttgtagtagcttatccattttgtccattacatgattctgtatatctgaatcgaatgttctaactgtacctttacaaaatgcttgatcaggaataacgctatctgtggtacctgcttgaatcattccaaatgaaaggacagcttgtttaactggatcgattgtacgtgaaattattttttgtgcacttaaaatgaactctgccatgattactattgggtcaatggtttcatgaggtttggcaccatgaccgccacgacctttaattgtgacactaaattcatctggagaggccatgattgcccccgcacgtgaatgaatagttcctgtaggataaccactccataaatgtgtaccgtaaattctatctacatcttccagacatccagcatctatcatttcttgagaaccacctggcatgatttcttcgccgtactggaatattaatacaacattaccttctaataaatgtttatgttcatctaaaatttctgcaacagtaagtaaaattgctgtatgaccatcatgcccacacgcatgcatacatcctggatttttagacttataaggcacatcgtttaattcctcgacaggtaacgcatcaaagtcagctcttagtgcaattgtgggtccgtcgcctgagcctttaaatgttgctttaattccatgaagtccaataggagtttcaatatcacaagataactggcttaattggttaacaatataatcatgtgtttgaaattcttcaaaagataactcaggatattggtgtaaataacgtctgagttgaattgttttattttctttattatttgctagttgaaaccaatctaacacccttatcactactttctaaaataatgtttatagtataacattttatgaaattatcgtactaaatgattgctttgagatattttatctatgaatgataaggctttcaagttatgtagaattactgtatgataaaggtattaccaaacaatacttaagggggattatatactgtggttcaatcattacatgagtttttagaggaaaatataaattatctaaaagaaaatggtttgtataatgaaatagatacaattgaaggtgcaaacggaccagaaatcaaaatcaatgggaaatcatacattaacttatcttcaaataattatttaggactagcaacaaatgaagatttgaaatcagctgcaaaagcagctattgatacacatggtgtaggtgcaggcgctgttcgtacaatcaatggtacattagatttacacgacgaattagaagaaacactagcaaaatttaaaggaacagaagctgcaatagcttatcaatcaggatttaattgtaatatggctgctatttcggctgttatgaataaaaatgatgctattttatcagatgagcttaatcatgcatcaattattgatggatgtcgcttatctaaagctaaaattattcgagttaatcattcagacatggatgatttacgtgcgaaagcaaaagaagcagttgaatcaggtcaatacaataaagttatgtatatcactgatggcgtttttagtatggatggtgatgtggctaaattacctgaaattgtagaaattgcagaagaatttggtttattaacttatgttgacgacgctcatggttcaggtgttatgggtaaaggtgctggtacggttaaacattttggtttacaagataaaatcgatttccaaattggtacgctttctaaagcaattggtgtcgttggcggttatgtagcaggtacaaaagagttaatagattggttaaaagcacaatcacgaccattcttattctctacatcattagcacctggggatactaaagcaatcactgaagcagttaaaaagttaatggcttcaactgaattacatgataaattatgggacaatgcgcaatatttaaaaaatggattgtcaaaattaggatatgatacaggtgagtcagaaactccaattacaccagtaattattggtgatgaaaaaacaactcaagaatttagtaagcgtttgaaagacgaaggtgtctatgtgaaatctatcgttttcccaacagtgccaagaggtacaggacgtgtaagaaatatgcctacagctgcacatacaaaagacatgttggatgaagcaattgcggcttatgaaaaagtaggaaaagaaatgaagttgatttaatatttatttattcccacggcaaatattgtcgtgggctttttttaaaatgtttagtgctccccaaaattcaagtttgaattttaaaagcatcttgtagaatttagttttatttttacaaagaaattcattttgattatttttgataatgagcattttaatagtaatacatgtttatggtgtgtagtatatgtctatactagtattaactatatagagaaagtaggaataaactatgtcacaagatgtaaatgaattaagtaagcaaccaacgccagataaagcagaagataacgcatttttcccatcaccatattcccttagtcaatatacagcacctaaaacagattttgatggtgttgaacacaaaggtgcctataaagatggtaaatggaaagtattgatgattgctgctgaagagagatatgtattattggaaaatggaaaaatgttctctacgggtaatcaccctgttgaaatgttattacctttacatcatttaatggaagcaggttttgatgttgatgttgcgacattatctggttatccagctaaattagaattatgggctatgccaactgaagacgaggcagttataagcacttataataaattgaaagaaaaattaaaacagccaaaaaaattagcagatgtgattaaaaatgaattaggacctgattcagactatttatctgtctttatcccaggtgggcatgctgcagttgttggtatttctgaaagtgaggacgttcaacaaacattagattgggcattagaaaatgaccgctttatagttacattatgtcatggaccagcagcactactttcagcagggcttaatagagaaaaatctccattagaaggatactctgtttgtgtcttccctgactcattagatgaaggtgcaaatattgaaataggttatttacctggacgcttgaaatggttagttgctgatttattaactaaacaaggattaaaagtagtcaacgacgatatgacaggaagaacgttaaaagatcgcaaattattaacaggtgacagtcctttagcttcaaatgagttaggaaaattagcagttaatgaaatgttaaatgcaatacaaaataaataattaaatattaattagaggagcctcatatgtaaatgtatgagtgctctttttttggcaaaattttagtgatacttgtaaaatagaacctattatgagtatgatttaagaaaacgcttgcaaaactaataaccgcaactagcgatatggaggaaacatgatgtcttatagcattggaattgattatggaactgcttcaggccgtgtgtttttaattaatacaactaacggtcaagtagtatcaaaatttgtgaaaccatatacacatggtgtcattgagagtgaattaaatggtttgaaaataccacatacatatgcacttcaaaatagtaatgattatttagaaattatggaagaaggaatatcatatatagtacgtgaatcaaaaattgatccagtcaatatagtaggtattggtatagactttacttcatctactattatttttactgacgaaaaccttaatccggtacataatttaaaacaatttaaaaacaatccacatgcgtatgtgaaactttggaaacatcatggtgcatataaagaagcagagaaattatatcaaactgctattgaaaataataataagtggttaggccattatggatataatgttagtagtgaatggatgattcccaaaataatggaagtcatgaatcgagcaccagaaattatggaaaaaacggcttatattatggaagcgggcgattggattgtaaataaattaactaataaaaatgtacgctcgaattgtggattaggtttcaaagcattttgggaagaagaaacagggtttcattatgatttatttgataaaatagaccccaaattatcaaaagtaattcaagataaagtatctgcaccggttgttaatattggtgaagcagtagggaaactggatgataaaatggcacagaaattaggattatcaaaagagactatggtaagtccttttattattgatgcccatgctagtttattaggtattggatctgaaaaagataaagaaatgactatggtgatgggaacaagcacatgccatcttatgttaaatgaaaagcaacatcaagtgccaggtatatcaggttctgtaaaaggagcaattattccagaattatttgcttatgaagcggggcaatcagcagtaggtgatttgtttgagtatgtcgctaagcaagcaccaaagtcatatgtagatgaagcagcaaatagaaatatgactgtatttgaattaatgaatgaaaagataaaacatcaaatgccaggtgaaagtgggctcattgctcttgattggcataatggaaatcgaagtgtattaagtgatagcaatttaacaggttgtatctttggattaactttacaaactaagcatgaggatatttatagagcatatttagaagctacagcatttggtactaagatgattatgcaacagtatcaagattggcatatggaagtagaaaaggtatttgcatgtggcggtatacctaaaaagaatgctgttatgatggatatctatgcgaatgtactgaataaaaaactaattgttatggatagtgagtatgcaccagcaataggcgcagcaatattgggtgcagtcagtggtggcgcacataattcaattaatgatgcagttgatgctatgaaagagccaattttatacgaaattaatccagaagcggaaaaagtacaaaggtatgaaacattatttaaagcttataagtctttacatgatatccatggttataaaaaagctaatataatgaaagatattcagagtttaagagttgagggataaaaaatttaatttgacattaattagtaatattcaacgctataaattactaaaatcaattaatacagctagaatttccatttacagaaatatcagcaacatgtacatgtcatatatacaagaaagcgcttttatattataattattatgaaaatgaatattatgtccgcgcgtggtggactatggttatatagaagagacaaaggagatatttctatgaaaaaaattatgattactggtgcattaggacaaattggtacagaattagttgttaagtgcagagaaatttatgggacagataatgttcttgctacagatattagggaacctgaagcagactcacctgtacaaaatggaccatttgaaatcttagacgtaacagatcgtgaccgcatgtttgagttagttagggactttgaagcggatagtctaatgcatatggcagcattattatcagcaactgctgagaaaaatccaattcttgcttgggatttaaatatgggtggattaatgaatgcattagaagctgcaagaacttacaatttgcactttttcacaccaagttcaattggtgcatttggagactcaactcctaaagttaatacgccacaagtaacgattcagcaacctacgacaatgtatggtgtaaataaagtagctggcgaattgttgtgtcaatattatttcacacgatttggtgtagatacaagaagtgttagattccctggtttaatctcgcatgttaaagaaccgggtggtggcacaacggactacgcagttgaaatttacttcaaggctgtaagagaaggacattatacaagcttcatagataaagggacatatatggatatgatgtatatggatgatgcgattgatgcaattattaaacttatggaagcagacgatgcgaaattagaaacaaggaatggttataatttaagtgcaatgagctttgatccagaaatggttaaagaagcaatacaagaatattacccagatttcaaattagaatatgatgttgatcctattagacaaggtatcgctaatagttggccggattctattgatacaagctgttcacgtggcgaatggggatttgatcctaaatatgatttagcgagcatgactaaattaatgttagaagctattgaacaaaaagatactgttaaaaataataactaatcatttccattcactttaatacacggaatgatattttaaattactctttattttaataaactagtgcatgaattctaatattattaattatacatattgaattcgcgagcttagttcatttttaaataaagagttttttgtattaaaaagatataattcaaacacagattacttgtctctatgaaaataatacgtttatactaaaagatataggctttctgaaaaagtgttaattaatttcgaatttttagaaaatttattgaacagtaaaatagggattgttataatttatgttaaacaaattcttatactatattattaggaggcaatcaccatgtcacaagcagttaaaattgaattacgcgaaacattaaaagaaaaaccagatacatctcaattaggatttggtaagtattttacagattatatgttgagttatgattatgatgcggataaaggatggcatgatttgaagattgtgccttatggtccaattgaaatttcgccagcagcacaaggtgttcactatggacaatcagtgttcgaaggtttaaaagcatataaaaaagatggagaggttgcacttttccgtccagatgaaaactttaagcgtcttaataactcgttagcacgcttagaaatgcctcaagtcaatgaaggtgaattgctagaaggacttaagcaattagttgatttagagagagaatgggttccggaaggtgaaggtcaatcattatatattcgtccttttgtttttgcgacagaaggggtacttggcgttggtgcatcacatcagtataaattattaattattttatctccttcaggtgcatattatggtggtgaaactttaaaaccaactaaaatctatgtagaagatgaatatgtacgtgctgttcgtggcggtgtaggctttgcgaaagttgcaggtaactatgcggcaagtttattagcacaaactaatgcaaataaattaggttatgaccaagtattatggcttgatggtgttgaacagaaatatatcgaagaagttggtagcatgaacattttcttcgttgaaaatggcaaagtaattacaccagagttgaatggcagtattctacctggtattacacgtaaatctattatcgaattagctaaaaacttaggatatgaagtcgaagagcgccgcgtatcaatcgatgaattattcgaatcatatgataaaggtgagttaacagaagtatttggtagtggtactgcagcagttatttcacctgtgggtacattgagatacgaagatcgtgaaattgtgattaataataatgagactggtgaaattactcaaaaattatatgacgtctacactggtattcaaaatggtactttagatgataaaaatggttggagagtcgttgtaccaaaatattaataaaaattgaatatgatcatgaaaacaaaatgtaaaagttaatcatgactaaaatccctttcaatgaagcgaagcatggtaataaattaagtttacaatgtttattgttaagtattgaaggggatttcacttattattatatttaattcaatatttaaaaagaacaatattacgagttcattttcaggggaataacgaacatcatagaatcagcataatacgaaataaataaataggagtattgatattaatggaatggatattatttgataaagatggtacgttaattgaatttgatagaagttgggaaaaaataggcgtaagatttgttgaatcattactagatacatttccagtacaaaataaagaagtggcacttagacaactcggtgtcattaaagaatctattgatccaaaatcagtgatgggttcaggatctttacaacaaattatagatgcatttaatgatgtgacaggacaagatacaactgaatggtcaaagtcaacgagtcaaaaacttgtagatgaaagaattcctgaaattaattgggtagatggtgttgaggaaacgcttcaaaagttgaaatcacgaggatacaaattaggtgtcgtaaccagtgatactaaaaaaggtgtagaacaatttttgactcatacgaatgcaacatcattattcgatataattatttcgactgaagcacatgcctatgagaagcccaaccctaaagttttagccccattatttgacaatcatgatgtggctcctaatcaagtagctattgtaggtgatactgccaacgatatgaaaaccgctagcaatgcaaatttagggatggcaattggtgtattaactggcgttgcaactaaagaggaattgcacgaagccgatgtaattttaaacagtgcgaaagatattttagaagtattaaaataaaaagaaagacatagtgtaaatgcagaagaatgtacgcatagaaattcaataaggtaatagatgatttctatggaatatacattaaattaaagcttttatactatgtcttaatatatttatcgcatatctatttgacgatacgtttttataatacgagcgattttatcaatcataggatttaaagaatcaggatctttgtgtatatcatattcattaatgttgatacgtacaactggacatgcattaaagctgttaatccaatcgtcataacgtttaaataactttttccaatattcagggtcagtatttatttccatttcgcgaccacgttcaataatgcgatcaatgacctcatcatagttacattctaaataaatcattacatcaggtttaggaaaataaggtgtcatgaccatggcattaaataagtctgaatatgttttgaaatcctctttactcattgtgccttcttcttcatgcatttttgcaaaaatatcaacatcttcataaattgagcgatcttggacaaaaccaccaccatattcaaacatacgcttttgttctttaaaacgttcagctaagaagtaaatttgcaaatggaaactccatcgttcaaaatcgctgtaaaatttatctaaatatggattatgttcgacattttcaaaagacgttttaaagtttaatttatctgcaagtgcttgcgttagagttgattttccaacaccaactgtacctgcaatggttataatggcattttgtggaataccgtaattattcattggtaatatctcctatcataggtaatataatatgtaatatatcttcgtaatcttgttcatttttaagaaaatcaatagaagttgtatcgattaaaactacatttgaaccattactttgtaaggactcataatattcacgataatctttttttaactttaacagatattcatcttctatttgatgctcaaaactacggttacgtttagcaattctagattttaacacatcaaggtctgcatctaaaaagataatcatattcggcataatcatatcttcagttaaaatatcataaattttactgaatttctgaaattcaacagaactcaaagtatttttagcaaatatcttatttttatgtatatgataatcactaactacaccttgatttagttgtgttacatcttgaaattgcttatatctattgcataaaaagaacatttcagtttgaaaactccatttagagatatcttcataaaagtctgataaaaatggattttctgtgatgatttctttttcttcataaaaatctaaagtttgacttaatttgtgtgcaagtgaagatttacctacgccaataggaccttcaattgctataaaaggtttgttcatattcacatctccaaatgttaaaatagacattgagtattgtaccataagtgaggtatctggacataaatgacaaatgatatatattttatgacattagcgattgaagaagctaaaaaagcagctcaacttggcgaagtacctataggtgctatcatcactaaagatgatgaagttatcgctagagcacataatttaagagaaacactacaacaaccaacggcgcatgctgaacatattgcaattgaacgtgcagccaaagtgttaggtagttggcgtttagaaggttgcacattatatgtaaccctagaaccatgtgtcatgtgcgcaggaacaattgtaatgagtcgcattccaagagtcgtctatggcgcagatgatcctaaaggtggctgtagtggcagtttaatgaatttattgcagcaatctaattttaatcatcgtgcaattgttgataaaggtgtacttaaagaagcatgtagcacattattaacaacattttttaaaaacttaagagccaataagaaatccaccaattagacgatagtacatactaattaaaatttgttagaattacattatatgataaattaatgacaatataaatgttaatagaaaagtatgtgcgctgagtatatattcttatttaagaacaagattttaaatttacgaaacgaggtaacataatgataaaactaatagccactgatatggatggcacgctacttaatgcagcacatgaaatttctcaacctaatattgatgcgattaaatacgctcaagaacaagggataacggttgttatcgcgacaggtcgagcattttatgaagcacaagcaccagttgctgacacagatttaacagtaccatatatttgtttgaatggtgctgaagtacgtgatgagactttcaatgtaatgagcacttcacaccttaataaatcgttagtacacaaaattaaaaatgttttaaaagatgcaggtatttattatcaagtatacacgagtcgtgcgatttatactgaagatccacaaagagatttagacatttatatagatattgctgagcgtgcaggtcaacacgcaaacgttgagcgtattaaaaatggtattcaaagacgcatagataatggtacgttgaaagttgttgataattatgatgctattgaaaacattcctggtgaattaattatgaaaatattagcatttgatggaaatttagaaaaaattgacaaagctagtaagattttagctgaatctccgaatttagctatatcatcatcttcgagaggaaatatagaaataacacattcagatgcacaaaaaggtattgcgctagaaacaattgccgaaagattagggattgaaatgaaagatgtcatggcaataggtgacaatttaaatgacgtatcaatgttagagaaagttggctacccagttgcgatggaaaatggtgctgaagaagttaaaaaaatagcaaaatatgtcacagatacgaatgaaaatagtggtgttggaaaagctattatgaaattattacgtgaacaacaagattaataaaaaagaggggtcaaatatgaaaggattaattattattggcagtgcacaagtgaattcacatacaagtgcactagcaagatacttaactgagcattttaaaacacatgatattgaagcggaaatattcgatttagcagaaaaaccgttaaatcaattagatttttcaggaacaacaccgtctatagatgaaatcaaacaaaatatgaaagatttgaaagagaaagcaatggcggcggactttttaatattaggaacgccaaactatcatggttcatattctggaatattgaaaaatgctttagaccatctaaatatggattattttaaaatgaagccagtaggattaataggcaatagtggaggtattgtcagcgctgaaccgttatcacatttaagagttattgtcagaagtttattaggcattgcagtaccaactcaaattgcaacacatgattcagattttgctaaaaatgaagatggtacatattacttaaatgacagtgaattccaattacgtgcaagattattcgtcgatcaaattgtatcatttgcgcataatagtccatatgaacatttaaaataaattaaataaaacatgtgaatatacattaaaaataggtatgtagcttaagacatttcattgagaatgcttttaagtcacatgcctattttttgttctaatgcaccaatagtaagcctttgagtttactgttgtgagcaatgttattaattaaaataagatgtaatagcgaaatgaaaacaagcttagattaaaagtaaggtttaaaaatatagataaataatttaaagcaatggaagaagaaaagtattaaaaattgcaattcttaatctgaaatacatattaatatttactgtaaataacattgtaaaataaaagaaaaaaattaaaacattgtactttatcgaaaagtgtattaagatagaaaggcagaaatttttatatgcaaattattatatttatcaaattttgatattttaaaggagtattattaaatgaataataaaaagacagcaataaatagaaaaggcatgataccaaatcgattaaacaaattttcgataagaaagtattctgtaggtactgcttcaattttagtggggacaacattgatttttgggttaagtggtcatgaagctaaagcggcagaacatacgaatggagaattaaatcaatcaaaaaatgaaacgacagattcaagtgagaataaaacaaccgaaaaagttgatagtcgtcaacaaaataatattgaacaaagtacaacgtcaaaccaaccaaaagtaaatgagtctgataatacttcagttaaagaaactactgaagaacctcaaaatacaacttctacacaaccaactaaacaaaataacgatgcgacggcaaataaagataatttagaggctcaaaatatttcaacgcaggctaaagatgtttcagctactcccaaaacaacgactattaaaccaagaacattaaaccgtttggctgtgaacacagtagcagcaccacaacaaggtacaaatgttaatgataaagttcatttttcaaatattgatattgctattgataaaggacatgtcaattctacaacaggtaaaactgaattttgggcgacttctagtgatgttttaaaattaaaagcgaattacacaatcgatgattctgttaaagagggcgatacatttacatttaaatatggacagtatttccgtccgggttctgtaagattaccttcacaaactcaaaatttatataatgcccaaggtaatattattgcaaaaggtatttatgatagtacaacaaacacaacaacatatacttttacgaactatgtggatcaatatacaaatgttagcggtagctttgaacaagttgcatttgcgaaacgtgaaaatgcgataactgataaaactgcttataaaatggaagtaactcttggtaatgatgcgtatagcgaagaaatcatcgtagattatggtaataaaaaagcacaaccgcttattacaagtacaaattatattaataatgaagatttatctcgaaatatgactgcgtatgtaaatcagcctaaaaatacatacacaaaagaaacatttgttagtactttaacaggttacaaatttaatccaaatgctaaaaactttaaaatttatgaagtaactgatcaaaatcaatttgttgatagctttacacctgacacttcaaagcttacagacgtaactgatcaatttgatattacttacagcaatgataataagactgcaacagttgatttaatgaaaggccaaacaagtagtaataaacaatatattattcaacaagttgcttatccagagaatacatctacagacaatggaaaaattgattatacgttagaaacagacaaaactaagtacagctggtcgaatagttattccaatgtaaatggctcatcaactgctaatggcgaccaaaagaaatataatctaggtgactatgtatgggaagatacaaataaagatggtaaacaagatgccgatgaaaaaggaattaaaggtgtttatgtcattcttaaagatagtaacggtaaagaattagatcgtacgactactgatgaaaatggtaaatatcagttcactggtttaagtaacggtacatacagtgtagagttttcaacgccagacggttatactccgacaactgccaatgcagggactgatgatgcagttgattcagacggtctaactacaacaggtgtcattaaagatgcagataattggacattagatagcggattttataaaacaccaaaatacagtttaggtgattatgtttggtacgacagtaataaagatggtaaacaagactcaactgaaaaaggaattaaaggtgttaaagttactttgcaaaatgaaaaaggcgaagtcattggtacaactgaaacagatgaaaatggtaaatatcgtttcgataatttagatagtggtaaatataaagttatctttgaaaagcctgctggcttaacacagacaggtacaaatacaactgatgatgataaagatgcagatggtggcgaagttgacgtaacaattacggatcatgatgatttcacacttgataatggctactacgaagaagagacatcagatagcgactcagactcagatagcgactcagattcagacagcgactcagattcagacagcgattcagattcggatagcgattcagattcagatagcgactcagattcagacagcgactcagactcagatagcgattcagattcagatagcgattcagattcagatagtgattcagactcagacagcgattcagattcggacagcgattcagactcagatagcgactcagactcagatagcgattcagattcagatagcgattcagattcagatagtgattcagactcagacagcgattcagattcggacagcgattcagactcagatagcgactcagattcagacagcgattcagattcagatagcgactcagattcagatagtgattcagactcagacagcgattcagattcggacagcgattcagattcagacagcgactccgactcaaatgcaggtaaacatacaccggctaaaccaatgagtgcagttaaagaccataacaataaagcgaaagcattaccggaaacaggtactgaaaataataattcaaataatggcacattattcggtggattattcgcggcattaggatcattattactattcggtcgtcgtaaaaaacaaaacaaataatatgattagcttaaccaggtccgtgtggcctggtttttctgtttagaaattcccagatataaaaccaaaaatctttaaggaatagatgcaatttaatttgttacagaaaagtaattgtctatgaattagaaaagttaagatattaattttaagggtaaataatattattttttatgatgattaaataaagattacaaaactcataaaaacttttatttaaacgcaaatgttaaataaagttttacgataaagaaaaataattaaagtattgtgctttatctaaaattgtaatactatattgatatacatttttgtatttaaaacaattgtattatttaaaaatttgatgaattaggagtaatctaatgctaaacagagaaaataaaacggcaatgacaagaaaaggcatggtatccaatcgattaaataaattttcgattagaaagtacacagtgggaacagcatcaatactggttggtacaactttgatttttggtatagggagccaagaagctaaagctgcagaagtaaccaacaaggaaatgaaggaagatgcaacatcagtaaataatgatcaagtgtctaaaaaagttgatacagggcaactaaataaggatggtaatactagtaaagttgatacagggcaactaaataaggatggtaatactagtaaagttgatacagagcaactaaatgatgagaatattaataaagttgctaatcaaaaagaagtaactagagtagaaaatagtgtcgcttcagaaaaaaataataactctcagccatctgaaaatggaaaattacaaacgtcggatgttaaaaaaactgaggataataatgcaacttcagatgatcaagttactactacagttaattcacagcaattaaatactgataacacaacttcaaatgcaacaatgtcggcagcaccaattaatgtaagtaaagatgacttaaaaattaatagtgaagaagtaagaaatgtaggagaaaaaagcgataatactgacaatgcaaatggttcagatgtgattatgccaaaaagtacagcacctaaacgtttgaatacaagaatgcgtatagcagcagtacaaccatcatcaacagactctaaaaatgttaataatttaattacttcaactacaactttaactgtcgttgatgcagataaaaacaataaaattgtacctgcacaagattatctagcattaaaatcacaaattaaagttgatgacaaagttaaatcaggtgattatttcacaataaaatactcagatacagtacaagtatatggattgaatccggaagatattaaaaatattggtgatattaaagatccaaataatggtgaaacaattgcgactgcaaaacatgatactgcaaataatttaattacatatacatttacagattatgtcgataggtttaattctgtacaaatgggaattaattattcaatttatatggatgctgatacaattcctgttagtaaaaacgatgttgagtttaatgttacgataggtaatgatacaacaaagactactgcaaacattcaatatccagattatgttgtaaatgagaaaaattcaattggatcagcgttcactgaaacagtttcacatgttggaaataaagaaaatccggggtactataaacaaacgatttatgtaaatccatcggaaaattctttaacaaatgccaaactaaaagttcaagcttaccactcaagttatcctaataatatcgggcaaataaataaagaggtaacagatataaaaatatatcaagttcctaaaggttatacattaaataaaggatacgatgtgaatactaaagagcttacagatgtaacaaatcaatacttgcagaaaattacatatggcgacaacaatagcgctgttattgattttggaaatgcagattctgcttatgttgtaatggttaatacaaaattccaatatacaactagcgaaagcccaacacttgttcaaatggttacattaagttcagacaatagtaaatctgcctcaatgggtaatgctttaggattcactaataaccaaagtggcggcgctggtcaagaagtatataaaattggtaactacgtatgggaagatacaaataaaaacggtgttcaagaattaggagaaaaaggcgttggcaatgtaactgtaactgtatttgataataatacaaatacaaaagtaggagaagcagttactaaagaagatgggtcatatttgattccaaacttacctaatggagattaccgtgtagaattttcaaatttaccacaaggttatgaggtaactccttcaaaacaaggtaataacgaagaattagattcaaacggtgtatcatcagtgataacagttaatggcaaagataatttatctgctgacttaggtatttacaaacctaaatacaatctaggtgactatgtatgggaagatacaaataaaaatggtattcaagatcaagatgaaaaaggtatatctggcgtaacggtaacattaaaagatgaaaacggtaacgtgttaaaaacagttacaacagacgctgatggcaaatataaatttactgatttagataatggtaattataaagttgaatttactacaccagaaggctatacaccgactacagtaacatctggtagcgatattgaaaaagactctaatggtttaacaacaacaggtgttattaatggtgctgataacatgacattagatagtggattctacaaaacaccaaaatataatttaggtaattatgtatgggaagatacaaataaagatggtaagcaggattcaactgaaaaaggtatttcaggcgtaacagttacattgaaaaatgaaaacggtgaagttttacaaacaactaaaacagataaagatggtaaatatcaatttactggattagaaaatggaacatacaaagttgaattcgaaacaccattaggttacacaccaacacaagtaggttcaggaactgatgaaggcatagattcaaatggtacatcaacaactggtgtcattaaagataaagataacgatactattgactctggtttctacaaaccgacttacaacttaggtgactatgtatgggaagatacaaataaaaacggtgttcaagataaagatgaaaagggcatttcaggtgtaactgttacgttaaaagatgaaaacgacaaagttttaaaaacagtaacaacagatgaaaatggtaaatatcaatttactgatttaaacaatggaacttataaagttgaattcgagacaccatcaggttatacaccaacttcagtaacttctggaaatgatactgaaaaagattctaatggtttaacaacaacaggtgtcattaaagatgcagataacatgacattagacagtggtttctacaaaacgccaaaatatagtttaggtgattatgtttggtacgacagtaataaagatggtaaacaagattcaactgaaaaaggtatcaaagatgttaaagttactttattaaatgaaaaaggcgaagtaattggaactactaaaacagatgaaaatggtaaatatcgtttcgataatttagatagcggtaaatacaaagttatttttgaaaagcctgctggcttaattcaaacaggtacaaatacaactgaagatgataaagatgctgatggtggagaagtagatgtaacaattacagatcatgatgattttacaatagacaacggttacttcgaagaagatacatcagatagcgattcagactcagacagtgattcagactcagacagcgactcagactcagatagcgactcagattcggacagcgattcagactcagatagtgattcagattcggatagcgactcagatagcgactcagattcagatagcgactcagattcagacagcgattcagattcagatagcgattcagattcagatagcgactcagactcagacagtgattcagactcagacagcgactcagattcagatagcgactcagattcagatagcgactcagactcagatagcgattcagattcagatagcgactcagattcagacagcgactcagactcagatagcgattcagattcagatagtgactcagactcagatagcgactcagattcagatagcgactcagattcagacagcgattcagattcagatagcgattcagattcagatagcgactcagactcagacagtgattcagactcagacagcgactcagattcagacagcgactcagattcagacagtgattcggactcagatagcgattcagactcagatagcgactcagattcagacagtggctcagattcagatagcgattcagactcagacagtgactcagattcagatagcgactcagactcagacagtgattcagactcagatagtgattcagactcagatagtgattcagactcagatagcgactcagactcagacagtgattcagactcagatagcgactcagactcagatagcgattcagatgcaggaaaacatacacctgtgaaaccaatgagtgctactaaagaccatcacaaaaaagcgaaagcattaccagaaacaggtagtgaaaataacggctcaaataacgcaacgttatttggcggattattcgcagcattaggttcattattgctattcggtcgtcgcaaaaaacaaaacaaataatacaatatgacccaggtccttgtggcctggtttttttatttcaaaatttatgaaatgtatcttatgtttgagattaaatagtgcaatgttttaaaaaatataacatacatcaatataaatttaattcatctttacattaaaagtgcgaacgaataagaaaagtaattaaacacagtatcaaaccatttaaaacaattagtataaaaagtaaatagataattaaaaatcaataaaattaagttattcaaaccaaagtgtaaaataacagttgaaaataaataaatttatttaaagtattgtgctttatctaaaaatgtattacgatgggaatacaaatttttatatgtaaaaatattagttttttgcaaatattgatattttaaaggagatttatatgattaacagggataacaaaaaggcaataacaaaaaagggtatgatttcgaatcgcttaaacaaattctcgattagaaagtatactgtaggaactgcatcgattttagtaggtacgacattgatttttggtctagggaaccaagaagctaaagctgctgaaaacactagtacagaaaatgcaaaacaagatgatgcaacgactagtgataataaagaagtggtgtcagaaactgaaaataattcgacaacagaaaataatttaacaaatccaattaagaaagaaacaaatactgattcacaacaagaagctaaagaagcaccaactacatctagtactcaacaacagcaaaataatgctacaacttcaactgaaactaggcctcaaaacattgaaaaagaaaatgttcaaccttcaactgataaaactgcgacagaagatacatctgttattttagaagagaagaaagcaccaaataatacaaataacgatgtaactacaaaaccatctacaagtgaaattcaaacaacaccaactacacctcaagaatctacaaaaattgaaaattcacaaccgcaagcaacgccttcaaaagtagacaatcaagttacagatgcaactaatccaaaagaatcagtaaatgtgtcaaaagaagaacttaaaaataatcctgagaaattaaaagaattagttagaaatgatagcaacacagatcgttcaactaaaccagttgctatagctccaacaagtgttacaccaaaacgtgtaaacgcaaaaatgcgctttgcagttgcacaaccagcagcagttgcttcaaacaatgttaatgatttaattaaagtgacgaagcaaacaatcaaagttggcgatgacgaagataatgtagtttctgcacatgatggcgaagaaattgaatatgactcagaatttacaattgataataaggtcaaagccggagatacaatgacaattaattatgataagaatgtaattccttcggatttaacagataaaaatgatcctatcgatattactgatccatcaggagaggtcattgctaaaggaacttttgataaagcaactaagcaaatcacatatacatttacagactatgtagataaatatgaagatataaaatcacgcttaactctatattcgtatattgataaaaaaacagttccaaatgagacaagtttgaatttaacatttgctacagcaggtaaagaaacaaatcaaaatgtcactgttgattatcaagatccaatggtccatggtgattcaaacattcaatctatctttacaaaattagatgaagataagcaaactattgaacaacaaatttatgttaatcctttgaaaaaaacagcaactaacactaaagttgatatagctggtagtcaagtagatgattatggaaatattaaactaggaaatggtagcaccattattgaccaaaatacagaaataaaggtttataaagttaaccctaatcaacaattgcctcaaagtaatagaatctatgattttagtcaatatgaagatgtaacaagtcaatttgataataaaaaatcatttagtaataatgtagcaacattggattttggtgatattaattcagcctatattatcaaagttgttagtaaatatacacctacatcagatggcgaactagatattgctcaaggtactagtatgagaacaactgataaatatggttattataattatgcaggatattcaaacttcatcgtaacttcaaatgacactggtggtggtgacggtactgttaaacctgaagaaaagttatacaaaattggtgactatgtatgggaagacgttgataaagacggtgtccaaggtacagattcgaaagaaaagccaatggcaaacgttttagttacattaacttacccggacggtacaacaaaatcagtaagaacagatgctaatggtcattacgaattcggtggtttgaaagacggagaaacttatacagttaaattcgaaacgccagctggatatcttccaacaaaagaaaatggaacaactgatggtgaaaaagactcaaatggtagttcgattactgttaaaattaatggtaaagatgatatgtctttagacactggtttttataaagaacctaaatataatcttggtgactatgtatgggaagatacaaataaagatggtatccaagatgctaatgaacctggtatcaaagatgttaaggttacattaaaagatagtactggaaaagttattggtacaactactactgatgcctcgggtaaatacaaatttacagatttagataatggcaactatacagtagaatttgaaacaccagcaggttacacgccaacggttaaaaatactacagctgaagataaagattctaatggtttaacaacaacaggtgttattaaagatgcagataatatgacattagacagtggtttctataaaacaccaaaatacagtttaggtgattatgtttggtatgacagtaataaagatggtaaacaagatacaactgaaaaaggaattaaagacgttacagttacattgcaaaatgaaaaaggcgaagtaattggaactacaaaaacagatgaaaatggtaaatatcgttttgataatttagacagcggtaaatacaaagtgatttttgaaaagcctgctggcttaacacaaacaggtacaaatacaactgaagatgataaagatgctgatggtggagaagtagatgtaacaattacagatcatgatgattttacaatagacaacggttacttcgaagaagatacatcagatagcgattcagactcagatagcgattcagactcagatagtgattcagattcagacagcgactcagacagcgattcagactcagacagtgactcagattcagatagcgattcagattcagactcagatagcgattcagattcagatagcgactcagactcagatagtgattcagattcagacagcgactcagactcagatagcgattcagattcagacagtgattcagactcagatagcgattcagattcagacagcgactcagattcagatagcgactcagattcagacagtgactcagattcagatagcgattcggactcagatagcgactcaaattcagacagtgattcagattcagatagcgactcagactcagatagcgactcagattcagacagtgactcagactcagatagcgactcagattcagacagtgattcagactcagaaagcgactcagattcagatacaggaaaacatacacctgttaaaccaatgagtactactaaagaccatcacaataaagcaaaagcattaccagaaacaggtagtgaaaataacggctcaaataacgcgacgttatttggtggattattcgcagcattaggttcactattgttattcggtcgtcgcaaaaaacaaaacaaataatacaatatgacccaggtccttgtggcctggttttttaatgattacacatgcaatagatgtatttttcatataaaataaacaataaagatacggaataaaacttatatgaggcgataatatgaattacattttaggaacaattttagaaagtaaaattacaggtgtagaaaaagcacaaataaatagactgaagttgttcaaacaacacggcatatcttcaaaatgtgtatatgttaaatggaatccttattcatacacatatgcgaagcaacatcggattgaaaatgatctgcttacaatgtatgactattttcaaaaagcaatcaattataaaaagacaaagcaagttaactggatacagtattgggaaaagtcatgtaggtacacattgaaatttgtggaaaattcaaatgatgtcagaatatatgatgaagagcaatttatcatgtatgctcattttttagataaacagtatcatcaattaaactatgtgaattattttgatcataaaagaagaaaagtaaaacgtgaattgtatgatggaagaggctttttaagttgttctcgaattttaggtgaaggacaacggattgtactcgaaaattactatacacctaatggggagatcgtcatccaaaaatatttcgacgatataaaaggggaaaatacgctcacaaaggttatcttaaatgaagaccagcatcaacaattttttgatacagaagatgaattagttcaatattttctccatcaattatgtaaaaataatgatcaaatcatattagaccgtcctcatgaattaggaaatgttattgcgggattaaatcaaagtattccagttattgttgtgctccacagtacacatttatccggcaccggtaatggtataaaaagtttttataaaacagtgtttaataatttaacacgttataaagcgattgttgtatcaacggaaaagcaatgccaagatatttcacaatatattgaaaataaaataccagttatcaatattccggttggctacgtggcaaatttaaagtatcaatttgacatcaatcaaaaggataaaaatcatatcatatcaattgctcgcctcgttgaaaataaacaaattaaacatcaaattgaagtgatcaagcaattagtaacaaaacatcccaatattcaattgaatatttatggacatggaaatgggttgtcagaatatcgacaacttgtagaagattatcatttatcggaacatgttaaatttcatggctttaaaacgcatattaatgaagaaattgctaaagcagaactaatgttatcgacaagtaaaatggaaggttttggcttagcaattttagagtcgctttcagtaggtacaccagtgatcagttatgatgtagattatgggccatcagaactgattcaagatggatttaatggctatttagtacctcaaggtgacatcaatcaaatggttgaaaaggtcgatcaattactaaataatactcaaatgatgcaacaattttcaattaatagtatagagtatgctcagcaatttaatgagataaatgtcagtacaaagtggcaaaatattttaaactaagtcaaaagaaaaacgcattttcctagaatcatctatttaacaaaccacgttcatacgaacttacatgtttagttaaatgacataggaaaatgcttttttataaaaataaagttaaagtacatttatataagacgaacaaattggtcccattgtttaattaacgacgctttactgtattgttgcgcttttgccaaactaccttttgacagccgttgttgtacttccggatgatcaatcacatattttactttttcgaatagcacatcttcatcatttttagtaattaaataaccattgaaatctgaagtaattaattcactaggaccatatttaatatcataactaataactggaacaccatgtgctaaagattcaagtagcgctaaagagaaaccttccatgttacttgttattaaactcaaataggcatcgctgtattcttggtctagattgcttaaaaagccgcgtaaatatacatgattttctaatccatatttttgtatcaattcatttaattttttactttctgaaccaaaaccatacatatggagttctactttcggtacataagggattaagcgtttaattaattcaatttgttgatgtaattgtttttcaggtgaataacgtgcaacggaaattaatttaacactgcgctgatctaatgtttggactggtgtatcaattgtttcactatagccgacaggaatattaacaacaggaatagtatggttaatacgtttttcaacatctaatttttgctgctcagtagaaacgataattgcacgatatcgagataaattttcaaacatcgctttatatacatttttaaatggcgatgaatctaatgcatcaatatttttaatgtgtgtactgtgaagcacagctactactgggattgacttaggtgttaagttgaaaataggtgctgtatacacattgcggtcactgaaaaataaatccccatgttgatatagttgtttaatgaaaaatgcgcctaattccgtttcattattaaagaaatattgtttgttagcatagtaaacaataattttttgtacttctggtttgccatctttgtaagaaaaatacttttctaattttgtgtctccttctggattatagaaaaattcacataatgtttgttgtttatcaacaagaatcctactacaacttaaaaagccacgcacatcataaaaatcacgttttacttttcgtctttgactatcaaaatgattcacataatctaatatacgatatttaggatcttgaaaatgggcatacattaagaaacgctcttgatcatatattctaaagtcatgactattttcaacatgttttaaagtataatgacattcatcagtccaatatgacaaccagtcaaatggttcattgcgttctaaatatgttgcttcttggaagaaatcatacatattaatatagtcagaactagtaatataattttgggcatttctatataaatatctattccatgacagaaatacacattgcgctggtcttcccatttctttaaataaatttaaacgattaataattgctttctctatcccagttaaattaacacctaaactattacctacaaaataattcatttacaacaccacttatatctattttttataattatatcacataatatttaattacttcttttaactggaagatgtgtttatttataaaacaacaagttttgatatttataatggtagtagttattcagtcaaatactaccaatatatcattgtagagcttaggatattgatttatgactcaggcacatcaaatgagaagatttataaaagagatatacaactctaggaggtataataaaaacgcgcaactactgttacgcgtttgaattaatcatatgatattatttgcgatactttaatttagcgaaagcatcatgttgatggatagactcttcattacgacattcgatatcgaaaccgtctaaccaatcaaattcaactaagtccgcggcaattaaacgaattaagtcttcgacaaagcgtggattttcatatgcacgctctgtcacacgtttttcatcaggacgttttaaaatagggtatagaattgaacttgcattagcttccattgcatctaaaattttgtttttatagtcatcaactatgtcttgatctttattaatatatgttttaacagtgacaacaccacgttggttgtgcgctgaatattcacttatttcttttgaacacgggcatagcgttgtgacagttgcttcaatagtaagttctttacgtgtaactttatcaccgtcaattgctaatccataagtgacatcggcattaccaactgctttaatatttgtggttggactatagcgatcaaagaaccatttcccagaaacatcaacgcctgccgcattttgtttcatattcgtttgtaaagtgcgtaacacctgataaagtgtattaaattcaagttcaatgccattatcatagtgcttttcaacactttcaataatacggctcatattaatacctttttcgtcttttgttaaacttgttgaaaaactaaatgtgccagctgtttgatactggtcaacaagtacagggtacactaagtttttaataccaacctcttctatttcaaataagaaatctttatgtgtactttgtaaatctgtcatttcgttcttagtagtaggtttcgtgccttcaatagggtctacggaaccaaagtgtttccaacgaccttctcgtgtcgataaatcaaattcagtcatttttttcctccgttaagatttaaagtgatatgtccaatatggttcgactgttaaaaagctgtgttgtttaccatcgatttcaggacttgctaattgttttaaaaatggacctgtttgagaagcatgtgcttcaaaagctttaattttcaggtctttaaaatctgtaatatcattttgaatatcaggttctccaagtgcttcggttgcatcattgctgaacgcaactaaagttaaacgagggcgttcttctttaggcatgcgttcaaccgttcgaattacagcgtctgctgttgcttcgtggtcaggatgtactgcatatccaggataaaatgaaataatcaatgatggatttgtatcatcgattaaagatttaatcatactatctatatgttcatagggttcaaattcgacagttttgtcacgtaaacccatttttcttaaatcagtaataccaataactttacaagcttcttctagttcacgctcacgaatacttggtaatgattcgcgtgttgcaaatggtggattacctaaatttcgtcccatttgacctaaagttaaacatgcatatgttactggtacgcctcgttggacataacttgctattgtccctgcagatgagaaggtttcatcatcaggatgtggaaatattactaatacatgtctttcgtcagtcatgttgatgcctcctctataaattaaatggttgctcgctaatttcaagcgctgcagcgagttgaccttcataattaaaacctgcaattaaaaattcgtcatgctcgttaacttcgtaatgcgttagaccttgtacataaacccagccaccatttgatagtttaaggccaatgcgataaggttctttattgccaccttttaactgagcatgtgtatatgttacttgaatgtttcttaaaaaagtaccagcattaaaaacacgttgatcgaaatggttcgcataggccccatttgtcgtttcaacatgcagatacacaggtttatgttcaaaagaagcaagtaaatctataacttcttgttctttaattggttccaacacgttcactccttacactatcaatgtgtttatctttctattttactaaaaactattcaataattgtatacgattgctcaattatttataaattaatttacatgaagggtaattactcaggattacacaatcatacagcattagttttttacttttaaaaatcaaaaaaattgttggaatttaaaaagtgttaaacattaaaaatgatgctatattaatggtgtatgaatgaattcataagtttttaaaatgtattaaatttgtggaggcatgtaaacaatgaaagtattaaacttaggatcgaaaaaacaagcatcattctatgttgcatgtgagttatataaagagatggcatttaatcagcactgtaaactaggtttagcaactggtggtacaatgacagatttgtatgaacaacttgttaagttattaaataaaaatcagttaaacgtagacaatgtatccacgtttaatttagacgaatatgtaggtttaaccgcatcacatccgcaaagttatcactattatatggatgatatgcttttcaaacaatatccttattttaatagaaagaacattcatattccgaatggagatgcctatgatatgaatgcggaagcgtcaaaatataatgacgttttagaacaacaaggtcaacgtgatattcaaattttaggtattggtgaaaatggtcatattggatttaatgaacctggtacgccgtttgatagcgttactcatatcgttgatttgactgaaagtactattaaggctaatagtcgatattttgaaaacgaagatgatgttccaaagcaagccatttcgatgggactagctaatattcttcaagctaaacgtatcattttactcgcatttggtgaaaagaaacgtgctgctattacacatttattaaatcaggaaatttctgttgatgttccagccacattacttcacaaacacccgaatgttgagatatatttagacgacgaagcttgcccgaaaaatgttgcgaaaattcatgtcgatgaaatggattgattgcaatgtttaattaagaaatgcctcgggaaaggttccaatagaaagataaaaagcattggaaggatgatttttagtggaattacaattagcaattgatttattaaacaaagaagacgcggctgagttagcaaataaagtaaaagattatgtagatatcgtagaaatcggtacgccaatcatatacaacgaaggcttaccagcagttaaacatatggcagacaacattagtaatgtaaaagtattagcagacatgaaaattatggatgcagctgattatgaagttagccaagcaattaaatttggcgcggatgtaattacaatactaggtgttgcagaagatgcatcaattaaagcagctattgaagaagctcataaaaataataaacaattactagttgatatgattgctgttcaagatttagaaaaacgtgcaaaagaactagatgaaatgggtgctgattatattgcagtacacactggttatgatttacaagcagaagggcaatcaccattagaaagtttaagaaccgttaaatctgttattaaaaattctaaggttgcagtagcaggtggaattaaaccagatacaattaaagaaattgtcgctgaaagtcctgatcttgttattgttggtggcggaatcgcaaatgcagatgatccagtagaagctgcaaaacaatgtcgcgctgcaatcgaaggtaagtaatatggctaaatttagtgactatcaattaattctagatgaattaaagatgactttgtcacatgttgaagcggatgagttttcaacgtttgcgtccaaaatactacatgctgaacatatatttgtagctggcaaaggacgttcaggattcgtggcgaatagttttgcaatgcgcttaaatcagctcggcaaacaggcacatgttgttggagaatcaacgacacctgcgattaagtcgaatgatgtatttgtaattatctctggttcaggttccacggaacatttaagattattagcagataaagcaaaatcagtaggtgctgacatcgtattaattactacaaataaagattctgcaataggcaatctagctgggacgaacatcgttttgcctgcaggtacaaaatatgatgaacatggttctgcacaaccgttaggaagtttgtatgaacaagcatctcaattatttttagatagcgttgtaatgggattgatgactgaaatgaatgtttcagaacaaacgatgcaacaaaatcatgctaatttagaataaaacaaagatagtcgataatatgatgcctaggcagaaatattatcgattatttttttatttaaataataaattatagtataatataaataataaacgaataggggtgttaatattgaagtttgaaaattatatttttgattttgatggtacgttggcagacacgaaaaaatgtggtgaagtagcaacacaaagtgcatttaaagcatgtggtttaacagaaccatcagctcaagacatatcgcattatatgggaatacctattgaagaatcatttttaaaattagcagaccgaccattagatgaagcaacattagctcagttaatcgatacatttagacatacttatcaatctattgaaaaggactatatttatgagtttgctggcataactgaagccattacaagtttatataaccaagggaaaaagcttttcgttgtgtctagtaagaagagtgatgtattagaaagaaatttatcggctatagggttaaatcatttaatcatcgaagctgttggatccgatcaagtaagtgcatataaaccaaaccctgaaggtatacatacaattgtgcaacgctacaatttaaatagcaaacaaacggtgtatattggggattcaacgtttgatgttgagatggcacaacgtgctggtgtgcaatctgcagctgtcacttggggtgcacatgatgcaagatcattacttcactctaatccggattttattattaatgatccatcagaaattaataccgtattataaaacttgttaaaacagagaatttcatggttaacatgcatattcataaatattagattatacatagaaatatttcgctttagattaggaatttaaaataaatatttattaaacattatgaatttttaaagagtgatgtctgattcgttgatcatttattttgtaaaaataaattaaagtaatgagaaagttattgaagtaaattgaatattagcatttaaatacgatgtagaaaatagcgatagcatataacttatatgaagttgtatgctatcgctatttttagttataattccaaaaagttaatcgttcgatgatttaagaattattattgtttaattcaaatgtacgagggtataaaatcattgaatttaattcgataaagtgaaatttttgaacaaacatacttttgtatttatataaaagtttatattcttataaatttgacaaaactaattaactccgtataattatgaaacatacaagagggagtgtatgaattcatggattttaataaagagaatattaacatggtggatgcaaagaaagctaaaaagactgttgttgcaaccggtatcggtaatgcaatggaatggttcgattttggtgtctatgcatatacaactgcgtacattggagcgaacttcttctctccagtagagagtgcagacattcgacaaatgttgactttcgcagcattagccattgcgtttttattaagaccaattggtggtgttgtatttggtattattggtgacaaatatggacgtaaagttgtattaacatcaacaattattttaatggcattttcaacattaaccattggattattgccaagctatgatcaaattggactttgggcaccaatactattattgcttgcaagagtactacaagggttttcaacaggtggagagtatgcgggtgcaatgacatatgtagccgaatcatctccagataagcgtcgtaactcattaggtagcggacttgaaattgggacattatcaggttacatagctgcttcaattatgattgccttactcacattcttcttaactgatgaacaaatggcatcatttggttggagaatcccattcttacttggtttattcctaggattatttggcttatatttacgtcgtaagcttgaagaatcaccagttttcgaaaatgatgttgcaacacagccagaaagagataacattaactttttacaaatcatcagattttattacaaagatatatttgtgtgttttgtagctgttgtattcttcaatgttacgaactatatggtaactgcatatttaccaacctatttagaacaagttattaaattagatgcaacgacaacaagtgtattaattacttgtgtcatggcaataatgattccattagcattaatgtttggtaagttagcggataaaataggtgaaaagaaagtatttctaattggtactggtgggctaacattatttagtatcatcgcatttatgttattacattcacaatcatttgttgtaatagtaatcggtatatttttattaggatttttcttatcaacttacgaagcgacaatgccagggtcgttaccaacgatgttttacagtcatataagatatcgaactttatcagtaacatttaatatctctgtttcgatatttggtggtacgacgccattagttgcaacatggttagttacgaaaactggagatccattagcacctgcgtattatttaacagcaatcagtgttattggctttttagttattacattcttacatttaagtacagcaggaaaatctctaaaaggttcgtatccaaacgtagataacgagcaagatagatcttattatgcagaacatccaaaagaagcattatggtgggttaaagaacgtaagaattagagattttaataaaaagtataaatcaatcgtatataagcactttaaagctagtaggttctgctaactttaaagtgctttttaaattgagaactgtaattagccgtaataaagtttttgtatatacataaacccccactgcaatgattatcgcaatgggggaaagaggggacttaaagcatatgtttagctttgaatacttaaaattctcttgctattgaaatgttaggatgtaaatatgtcttagagtattttgtccaacgcaattaatattgagactctaaccttcaatattattatagagaacacaaacttaaatagattgggtgacttatttgtgtcagttattgcgattgcgataacttcttttctctatatacatatagtaacgtcttatctaataaaaaacatggtactacagtatcaaatttatctagggcttaagtttgatttttataataggcaggtttacctgataaaaattcttattcattatataatgttaacaagatgtattttaaagtttacattgagtgagggatattgatgaacgtaattttagaacagttgaaaacacatactcaaaataaacctaatgacatagcattacatatcgatgatgaaacaattacatatagtcaactaaatgcccgcatcactagcgcagttgaatctttgcagaaatattcacttaaccctgtcgttgctattaatatgaaatcaccggtgcaaagtattatttgttatttagctttgcatcgtttacataaagtgcctatgatgatggaaggtaaatggcaaagtactatacatcgtcaattgattgaaaaatatggtattaaagatgtaattgaagatacaggtttcatgcagagtatagactcaccgatgtttattgattcaacgcaattacagcactacaccaatttattacatattggttttacttcagggacaactggactgccaaaagcatattatcgtgatgaagattcatggttggcttcttttgaagttaatgaaatgttgatgttaaaaaatgaaaatgcaatagcagcccctggaccactatcgcactcgttaacattatatgcgttattgtttgctttaagttccggtcgtacttttataggacagaccacttttcatcctgaaaagttacttaatcaatgtcgtaaaatatcatcatacaaagttgctatgtttcttgttccaacgatgattaaatcattattgttagtttacaacaatgaacatacaatccaatcattttttagcagtggggataagctgcattcttctatttttaaaaagataaaaaatcaagcaaatgacataaatttgattgaattttttggtacatcggaaaccagttttatcagctataacttgaatcagcaagcaccagttgaatctgtaggtgtgctatttccaaatgtggaattgaaaacaacgaatcacgatcacaatggtataggaactatttgtataaaaagtaatatgatgtttagtggctatgtaagcgaacaatgtataaataatgatgaatggtttgttactaatgatgatggctatgtaaaagagcagtatttatatttaacgggacgacaacatgatatgttaattattggtggtcaaaatatatatccagcacatgttgaacgccttttaacgcaatcgtcgagcattgatgaagcaattataatcggtattccaaatgagcgttttggtcaaataggcgtattgctttattctggtgatgtgacacttacacataaaaatgtaaaacaatttttaaaaaagaaagtgaaacgctatgaaattccatcgatgattcatcatgtagataagatgtattacactgcaagtggtaaaattgttagagaaaaaatgatgtcgatgtatttgagaggtgaattataatatgaatcaagcagtcatagttgcagctaaacgaactgcatttgggaaatatggtggcactttaaaacatttagagccagaacaattgctcaaacctttattccaacattttaaagagaagtatccagaggtaatatctaaaatagatgatgtagttttaggtaatgttgttgggaatggtggcaatattgcaagaaaagcattgcttgaagcggggcttaaagattcaatacctggcgtcacaatcgatcggcaatgtgggtctggacttgaaagtgttcaatatgcatgtcgcatgattcaagccggagctggcaaggtatatattgcaggcggtgttgaaagtacaagtcgagcaccttggaaaatcaaacgaccgcattctgtgtacgaaaccgcattacctgagttttatgagcgtgcatcatttgcacctgaaatgagcgacccatcaatgattcaaggtgctgaaaatgtggccaagatgtatgatgtttcaagagaattacaagatgaatttgcttatcgaagtcatcaactgacagcggaaaatgtaaagaatggaaatatttctcaggaaatattacctataaccgttaaaggagaaatattcaacactgatgaaagtctaaaatcacatattccgaaagataactttggtcgatttaagcccgtgatcaaaggtgggaccgttaccgctgcgaatagttgtatgaaaaatgatggtgcagttttattgcttattatggaaaaagatatggcatacgaattaggtttcgagcatggtttattatttaaagatggtgttacggtaggtgttgattctaattttcctggcattggtccagtaccagccatttccaacttactaaaaagaaatcaattaacgatagaaaatattgaagtcattgaaattaacgaagcgttcagtgcacaggtggttgcctgccaacaagctttaaatatttcaaatacgcaattaaatatatggggtggtgcattagcatcaggtcatccatacggtgcaagcggtgcccaattagtgacgcgattattttatatgtttgacaaagagtctatgattgcatctatggggattgggggaggtctaggaaatgcagcattatttactcgattctaaccagcgattaaatgtgtcattttctaaggatagtgtggctgcatattatcagtgttttaaccaaccttatagaaaagaagtaccaccattaatgtgtgcgtcattatggtcaaaatttgatttatttaaaaaatatgcaaatagcgaactgattttaacaaaatcagcaattaatcaaactcaaaagatagaagtagacacaatatatgtaggacgtttagaagatattgaatgccgacagattcgcaatatcacacgttatacaatggctttaacattaactaaaaatgatcaacatgtcataacggttacacaaacttttattaaggcgatgaagtagagatgaagtttaatgagatatggataaatgaatatttggcgctcgtaaatgatgataatccaatacataatgagattgtgccaggacaattagtgagtcaaatgatgttgatggctatgtcattagaggcgaaccagtgtcaaattaattacgttaaacctattttaataaatgaaaatatcgaattcattgaagaacatgagcaagaaatgatagcaattaatgacgatggagagattaaaataaagatttctttgagcacaaaaaaataaccgatattagctgcatgaacgcatattaattaggagatgaaaggacagctaatatcagttatgtattgttattattattgggaacagagataaatataggttacgtttctttctttgcacggggatgcattaatctaaaataataataacaactatatcaatgtttaataaattctggattattggaacgattagtcaatttaactaactttcatatgatctatatcgtcttgtaataaagagagcaatttgaatatttcagtatcactaaatgaatcgtcacatttaattgaaacatgctgaaacgttttggttataatttcataaactggtgcgccttcatgatgatactgtcgataaataatcataacctatattacctcctttgctactctatggttatattataaataacatttttatgtgtgacatcaaccttaagtatcaactttttatcagacatagaacgtattttttactaagactatttatgtataaaatttccaaagaaatatatttttatagagtcgttgagaagttatttttaatttcaaaaaatgtcggaattagtagagcgggataaaacgttatgtttaaacaagggcataataaagttccgaaaggatttgtttttttaggataactgattcgtgacactgtaactgaatattatatacatatgttgaaataaaactacctgtaacgatgacttacaatacttttttgtccaatttaactgtggagatcaaacaagtatttaataactaaaataaccacaccgaaagtgactttattgtgtactgagctccaaagttagactttgaaagctaactttactggcgcacagcaatgacactcaaattataaggtgtggttaatctattttttatgaaagaagcattaaacctctgttacttcaacatcgatatgttcaatacggttgtatgcaccgtgatccacaggaccaacaaaatcgttcattttccaaccgtttttaatagcagaagcgacgaaagctttcgcactaatcacagcttctttcggtgacttaccgttagctaaatatgcagttgttgccgcagcaaatgtacaaccagcaccatggttataactttgttggaacatgtctgtagttagttgataaaatgtttgaccatcatagtataagtcatacgatttatcttgatctaaagctttgccacctttaatgatgacatgctgcgcgcctttatcaaagataattgttgcagcctttttcatatcttcaattgaatttaatttacctaatcctgataattgacctgcttcaaataagtttggtgtcactaccgttgctttaggtagtaaatatttaatcatcgcctcagtatttccagggttaagcacttcatcttcgcctttacaaaccatgacaggatctactacaaagtattgtgcattagatgcctcatatacttctccagcacgtttgattatctcctcagtacctaacatacctgttttaatagcatcaggtccgattgataaagccgtttcaagttgcttttcaaatacgtccataggtaatggtgtgacatcgtgtgaccatgtatctttatccatagtaacgatggcagttaaagcgaccatgccatacgtatctaattcttggaacgttttcaaatctgcttgcatacctgcgccagcacttgtgtcagaaccggcaattgttaaaactttctttaaagccattgagcttcactcctacataataatattgtattcatcatatcatttttaacctaattgaaaaatattaagcattcaatatttgatgattgttgaaatgaatcattcatactattgtaacttttgaaaatgtcattcactttagataagtgtgatatgttaaaatatgtcctgaggtgagattgaatggaatggtcgcaaatttttcatgacataacaacgaaacatgactttaaagctatgcatgattttttagaaaaagaatattcgactgcaatcgtataccctgatagggaaaatatatatcaagcgtttgatttaacaccgtttgaaaatatcaaagttgttatattaggacaagacccgtatcatggtccaaaccaagcacatggattagcattttcagtgcaacctaacgcaaaattccctccatctttacgtaatatgtataaagaattagcagatgatattggatgtgttagacaaacaccacatttacaagattgggcaagagaaggcgtcttgttattgaatacagttttaaccgtaagacagggtgaagcaaattctcatcgtgatattggttgggaaacatttactgatgaaattattaaagcagtgtctgattataaagaacatgttgtctttattttgtgggggaaacctgcacagcaaaaaataaagcttatcgatacatctaaacattgtattataaaatcagtgcatcctagtccactgtctgcatatagaggattctttggatcaaaaccgtattccaaagcgaatacctatttagagtcagtaggaaaatcaccaattaattggtgtgaaagtgaggcgtagatggtgaatagagaaactttaatagcacgaattgagcaagaattagtacaagcagagcaggcgcagcatgaccatgactttgaaaaacatatgtatgccatacatatattaacatctttatatgcttcaacatcaaatacaccacatattggtgaacaacaaatgaatcatcgtattgctaaccataatcaaatgccacattcacaaattacgcagccaacacatcaagtgacagctgctgaaattgaagcgatgggtggtaaagtaaatacgcattcagcacatcatcataataagtcatattcacaaccttcaaaccaacaccaaagattagcaacagatgatgacattggcaatggtgaatccatatttgatttttaaaaagcaacaatgaaacataatgatttaatagcttgttaagtatgtaggttaataatcaagacgcatatacttttattcgagtgttcggatttaaacatttattaatactgaattatataaggagaggtagcaatgaaattatttattattttaggtgcattaaacgcgatgatggctgtcggaacaggtgcatttggtgcacatggtttacaaggaaaaataagtgatcactatttatcagtatgggaaaaagcaacgacgtatcaaatgtaccatggcttagcattattaattataggtgtaattagtggtacaacttcaatcaatgttaactgggctggctggttaatatttgctggtattattttctttagtggatcattatatattttagtattaactcaaattaaagttttaggtgcgattacgccaattggtggcgtattgttcatcattggatggataatgttaatcattgcgacattcaaatttgctggttaaattttaaaactttagattacctatgtaactaaacattaaatttttaataaaaataatcaagaaaaagagttacaaactcatcttttgggtatagaataccttcgaggtgagtttttatttatggaaaaaaagaataagcaaatagatagaggcgatttaaaacaaaacctatctgaaaagtttgtatgggcgattgcatatggttcatgtatcggatggggcgcattcatcttaccaggagactggattaagcagtcaggtccgattgcagcatcaattggtattgttattggtgcattattaatgatattaattgcggttagttatggcgcattagtagagagatttccagtatcagggggcgcgtttgcctttagtttcttaagtttcggcagatatgtgagtttcttctcatcatggtttttaacttttggctatgtctgtgttgttgctttaaatgcgaccgcattcagtttactagttaaattcttattgccagatgtcttaaataatgggaaactatacaccattgcgggctgggacgtttatattacggaaatcattattgcgaccgtattactacttgtattcatgctagtaacgattcgtggcgcaagtgtatctggatcattacaatattatttctgtgtggcgatggtaatcgtcgtattattgatgttctttggttcattctttggtaataattttgcacttgaaaatttacaaccgttagctgaacctagcaaaggatggttagtgtctattgtggttattgtatccgtggcaccatgggcatatgttggatttgataatattccacaaacagcagaagagtttaactttgcaccaaacaagacatttaagcttatcgtgtatagtttattagcagcatcattaacttatgttgtcatgattttatacactggttggttatcaacaagtcatcaaagtttaaatggacagttgtggttaacaggtgctgttacacaaacagcatttggttatattggattaggtgtattagcaattgcaattatgatgggtatatttactggtttaaatggattcttgatgagttcaagtcgcttgttattttctatgggacgttcaggtattatgccaacaatgtttagtaaattacatagtaaatacaaaacaccatatgtcgcaatcatattcttagtaagtgtgtctttaattgcaccttggctaggaagaacggcattgacttggattgtagatatgtcatctacaggtgtatccattgcctactttattacatgtttgtctgctgcgaaattattcagttataacaaacaaagtaatacgtatgcaccggtttacaaaacgtttgctattatcggctcatttgtatcattcattttcttagcgttgttattagtgccaggttctcctgcagcactgactgcaccatcttatattgcattacttggatggttaatcatcggtttaatattctttgtgattcgatatcctaaattgaaaaatatggataatgatgaattaagtcgcttgattttaaatagaagtgaaaatgaagttgatgatatgattgaagaacctgaaaaagaaaaaactaaataataaaagaatcgcacaatataccttcttcattcggaggcgtatcgtgcgattttttgtattataaattgacatttaagacgaggcagctgaaccttatatataattgctaagagtttgggctgagccatttctaacaatatttataatcgtttaaaagatttcacgaacccagaaacaattaatttggaaatttggtcggcgaataataaacctaatgcgatggctcctgcaataagtgttacttctaacattgtatttattgctgtgctgaaatttaataagactaaatttttcgttgcatcgtaagctaatccacctggcactaacgggatgatacctgtcaccataaaaatgattgcaggttctttttgtttacgtgccatatagtgacttaataaacctagggcaagactgccgaagaaactagagtatatagtgtgcacactaaagccgttgaagaataaggtataaaccatccatccacacgtaccaacgaaaccacatgatagatataattttctaggtgcatcaaaaatgacgcagaagaacattgaagctaaaaagctaaagataaagtttaagatccaaaacatagtctgatactcctatactaaaattaatacgctaccaacgccagcaccgatgccaaacgcagtaaccaatgcttctaatgatttcgttgtgaacatcaacatgtgtccaccaaataaatcttgtattgcgtttgttattaatacaccaggaacaataggcatgactgccgcaatgataatagttgccaagtcacctgttggaataagtgtatgtccaataacggcgataatcccaataactaatgaaccaatgaattctgggataaactgtgcgtgtaatttacgatctaaaatctcagtgactaggtatcctagactacctgctaatatcgcagttaaaacatcaatcaatctaccaccttgtaaatataagaaactcattgcaatcattgctgcagcaaaacctttaaagggaagactgctgtcacgcttagcaacatatattttttcaagttgcgtttttgcctcggctaaagaaatttcattatttgtaatttgacgcgaaattttattagcttgagaaatttttattaagtttgtatctcgagaggtaattctaaatattctaggaaacgattccgaatgtaatgtaaactggatgacagtgtttgtaacaaagctgttactttcactgtaaccaagtttttttgcaatacgtgtcatggtatcttctacacgcgtaccttctgcaccagattctaatagtatgcgagcagcaagcatgacaacatctttgataagtacctcttgtttgtattcttctgaatttatgtccatttcatcaccattgtttataagaatttaatacttattatagtttatacactataaaataaccacatgagctttttgataagttgttattgattttaaaaaactaatatttgatactattgtaataataatcatcggaatttttagtggttaaaattctcttgaagtataaaaaggaaaaaatattgaaaaaaattcgacaaaaatatgtttcaaatatttcaaataggttaaaataatattagttaaccattacaaaaattgtatagagtagcgactgtataatttctattgaggttaacgtttatatgtagtgatagtagttaaagttctcccaaggaagactactcgggtacactttgctatgagcaaagtgtactttgttattgatattacattagcacatatatataagtttaaacatacagatttcaactatttaccaaatcacgtcttatgtatacgggaatatactgaagataaacgaaaaattccaagcttaaaccgataagcttggaattttttattaatttataaacgtaccaatgtattaagaaatcgcaaagaattgatcgaattcgtttgtgttaataatatgtcctacaaagaaactaccgaattcaccgtatcgtgctgttgtttcatcaaagcgcatttcgtatacaatttttttgaattgtaatacgtcatctgagaacaatgttacgccccattcgaaatcatcaaaccctacagaaccagtaataaattgtttgattttgcctgcatattttctaccaatcataccatggtcatacattaatttttggcgttcttccatagttaacatgtaccagttataagtttcattacgacgtttgttcattggatagaaacaaatataatcagaatgtggtaattctgggtataatcttgctttgatatgagggttctcataaggatcttcatcagatttaccagctaaataattgctcaattcaatgactgatacatatgaatatgtagggattaagaagtcagcaatgcgtaatttgttaaattcattttcaatatgatttaaagacttcatttcaggacgtaagaaccataataacaaatctgctttttgaccagttatattataaatagcttgatcaccagattttgatgatcttacagttgctgtattttctaaaaatgattgaaattcagtgacaagtgcatcgcgttcgtcctttggaactagacgtaatgatgcccaatcaactgcataaaataaatgtagactataccaaccatctaatgtttcggctgcttgactcatgtttatcgctccttttcaaaaatcatcagttctttataaattttatcataaagcaaaggggtaacgataaaattatgattacaaattggtgacgtggcattatgaaataaaatggcgtataattataccgtgaatgattaataagatttatattacaggaggacattatggctgatttattaaatgtattaaaagacaaactttctggtaaaaacgttaaaatcgtattacctgaaggagaggacgaacgtgttctaacagctgcaacacaattacaagcaacagattatgttacaccaatcgtgttaggtgatgagactaaggttcaatctttagcgcaaaaacttaatcttgatatttctaatattgaattaattaatcctgcgacaagtgaattgaaagctgaattagttcaatcatttgttgaacgacgtaaaggtaaagcgactgaagaacaagcacaagaattattaaacaatgtgaactacttcggtacaatgcttgtttatgctggtaaagcagatggtttagttagtggtgcagcacattcaacaggcgacactgtgcgtccagcattacaaatcatcaaaacgaaaccaggtgtatcaagaacatcaggtatcttctttatgattaaaggtgatgaacaatacatctttggtgattgtgcaatcaatccagaacttgattcacaaggacttgcagaaattgcagtagaaagtgcaaaatcagcattaagctttggcatggatccaaaagttgcaatgttaagcttttcaacaaaagggtctgctaaatcagacgacgtgacaaaagttcaagaagctgtcaaattagcacaacaaaaagctgaagaagaaaaattagaagcaatcattgatggcgaattccaatttgatgctgcgattgtaccaggtgttgctgagaaaaaagcgccaggtgctaaattacaaggtgatgcaaatgtctttgtattcccaagtttagaagctggtaatattggttacaaaattgcacaacgtttaggtggatatgatgcagttggtccagtattacaaggtttaaattctccagtaaatgacttatcacgtggctgctcaattgaagatgtatacaatctttcaattattacagcagcgcaagccttacaataacgatggatttagcgagtaaatattttaatggtgtcaactggcgatatatcgaccattcttctggattagagcctatgcaatctttcgcattcgatgatacattttgcgaaagtgtgggcaaagatatatcagataatgttgtgcgtacttggattcatcaacatactgttattcttggtattcatgattcaagattgccgtttttaaaagatggcattgattatttaacgaatgagattggttataatgccattgttagaaattctggaggcctaggtgtcgttctagatcaaggtgtattaaatatatcgctgatgttcaaaggacaaacagaaacaacgattgatgaagcgtttactgtgatgtatctcttaattagcaaaatgttcgaagatgagaatgttgatattgatacgatggaaattgaacattcttattgcccaggaaaatttgacttaagtatcgatggtaagaaatttgcaggcatatcgcaacgaagagttagaggcggtattgctgtacaaatttatctttgtgttgaaggctctggttcagaacgtgcattgatgatgcaaacattttatgaacatgctttaaaaggtgaagtgactaaatttaaatatcctgaaattgaaccatcttgtatggcctcattagagacattgcttaacaaaacgattactgttcaagatgtaatgtttttactattatatgcaatcaaagatcttggcggtgtattaaatatgacacccattactcaagaagaatggcaaagatacgatacgtattttgataaaatgattgaaagaaacaagaaaatgatagaccaaatgcaatagttaaatatttaacagcccctttcaagttatcgtttggggctgttatttttgaaagtatccataaatagcataaatatgttattgacctaatatttaaattgaacatcattaaattaaaagtaatgatatgattgaaataataaatttaataagaaaatttcatgttttacgtattaaatagattgagaatagggtatatataatgcgtatgactatgaaagaacgaaccttctattgaaatgttctaatactttagtagtaaatctatatattccaattattatttgtagtattatagttagggtggaaaattataaattgtagggctattttataaaaagataaagaatctgaaatatcactcgataagatttaaactttgaagtaaacgaaagttagttttatactaatcaagttaagtcaaatataaattcaaattaaagattatacataatatgaataatgtgagataaagactgcaatgaaatttaacgcgaatgcgtatgcaacttagaatatgatgtcttttactaataaataaaaataatgaatcaagtataggataaatataaaaggtgatattgacatgacaagaaaaggatatggggaatcgacaggtaagattattttaataggagaacatgctgttacatttggagagcctgctattgcagtaccgtttaacgcaggtaaaatcaaagttttaatagaagccttagagagcgggaactattcgtctattaaaagcgatgtttacgatggtatgttatatgatgcgcctgaccatcttaagtctttggtgaaccgttttgtagaattgaataatattacagagccgctagcagtaacgatccaaacgaatttaccaccatcacgtggattaggatcgagtgcagctgtcgcggttgcttttgttcgtgcgagttatgattttttagggaaatcattaacgaaagaagaactcattgaaaaggctaattgggcagagcaaattgcacatggtaaaccaagtggtattgatacgcaaacgattgtatcaggcaaaccagtttggttccaaaaaggtcatgctgaaacgttgaaaacgttaagtttagacggctatatggttgttatagatactggtgtgaaaggttcaacaagacaagcagtagaagatgttcataaactttgtgaggaccctcagtacatgtcacatgtaaaacatatcggtaagttagttttacgtgcgagtgatgtgattgaacatcataactttgaagccttagcggatatttttaatgaatgtcatgcggatttaaaggcgttgacagttagtcatgataaaatagaacaattaatgaaaattggtaaagaaaatggtgcgattgctggaaaacttactggtgctggtcgtggtggaagtatgttattgcttgccaaagatttaccaacagcgaaaaatattgtaaaagctgtagaaaaagctggtgcagcacatacatggattgagaatttaggaggttaatgcgttgattaaaagtggcaaagcacgtgcacatacgaatattgcacttataaaatattggggtaaaaaagatgaagcactaatcattccaatgaataatagcatatctgttacattagaggaattttacactgaaacaaaagtcacttttaacgaccagttaacacaggatcaattttggttgaatggtgaaaaggttagtggcaaagaattagagaaaatttcaaaatatatggatattgtcagaaatagagctggcatcgattggtatgtagaaattgaaagcgacaattttgtaccaacagcagcaggattggcttcatcagcaagcgcatatgcagctttagcagcagcttgtaatcaagcgctagacttgcagctgtcagataaggatttatcgagattggcgcgaatcggttcgggttctgcgtcgcgtagtatttatggtggatttgcagaatgggaaaaagggtatagtgatgagacgtcatatgccgttccacttgaatcgaatcattttgaagatgaccttgccatgatatttgttgtgattaatcaacattctaaaaaggtacctagtcgatatggtatgtcattgacacgaaacacatcaaggttttatcaatattggttagatcatattgatgaagatttagctgaagcaaaagcagcgattcaagacaaagattttaaacgccttggtgaagtaattgaagaaaatggtttgcgtatgcatgccacgaatctaggatcaacaccgccgttcacatatcttgtgcaagaaagttatgatgtaatggcgctcgttcacgaatgccgagaagcggggtatccgtgttattttacgatggatgcgggtcctaatgtgaaaatacttgtagaaaagaaaaacaagcaacagattatagataaattattaacacagtttgataataaccaaattattgatagtgacattattgccacaggaattgaaataattgagtaaggaagagataaaatgattcaggtcaaagcacccggaaaactttatattgctggagaatatgctgtaacagaaccaggatataaatctgtacttattgcgttagatcgttttgtaactgctactattgaagaagcagaccaatataaaggtaccattcattcaaaagcattacatcataacccagttacatttagtagagatgaagatagtattgtcatttcagatccacatgcagcaaagcaattaaattatgtggtcacagctattgaaatatttgaacaatacgcgaaaagttgcgatatagcgatgaagcattttcatctgactattgatagtaatttagatgattcaaatggtcataaatatggattaggttcaagtgcagcagtacttgtatcagttataaaagtattaaatgaattttatgatatgaagttatctaatttatacatttataaactagcagtgattgcaaatatgaagttacaaagtttaagttcatgcggagatattgctgtgagtgtatatagtggatggttagcgtatagtacttttgatcatgaatgggtcaagcatcaaattgaagatactacggttgaagaagttttaatcaaaaactggcctggattgcacatcgaaccattacaagcacctgaaaatatggaagtacttatcggttggactggctcaccggcgtcatcaccacactttgttagcgaagtgaaacgtttgaaatcagatccttcattttacggtgacttcttagaagattcacatcgttgtgttgaaaaacttattcatgcttttaaaacaaataacattaaaggtgtgcaaaagatggtgcgtcagaatcgtacaattattcaacgtatggataaagaagctacagttgatatagaaactgaaaagctaaaatatttgtgtgatattgctgaaaagtatcacggcgcatctaaaacatcaggcgctggtggtggagactgtggtattacaattatcaataaagatgtagataaagaaaaaatttatgatgaatggacaaaacatggtattaaaccattaaaatttaatatttatcatgggcaataaatgatttgataggggagcaatcatctaatttaattagaagataaatgctccattttttattgtcagccgtgttacgtatcttgaaaaaaatattaaaaagagtaaaatagatagagttaacgaaaaaattaatgaaatcaacgatatagatatgataaagaaaggtgggtagcaatatgaaaaatacattccttatttgtgatgaatgtcaggcagtcaatataagaacgttacaaaagaagttggaaaaattagatcccgatgctgaaatcgtgataggttgtcaatcttattgtggacctggacgccgaaaaacattcacttttgttaataaccgcccactggctgcgcttactgaagaagaattaatcgaaaaagtttctcaacaattaaagaaaccacgtgatcctgaagaagaagagcgtttaagaaaacgacatgaagaacgtaaacgtcgtaaagaagaacaagatagaaagcttaaagaaaaattagaaaagcgaaaagcacaacaataaaacctgatggcagcatcattcaatgcgtgccactaggtttttatgttttgtctagaaattaaataaatcattaaatgattcggccatcgtaggatgcgtataaatattatctcgtaatacggtatatggaatgttttgatcaatcgcaagtttaattatattaattaattcttcagattgcttaccatataatgtagcacctaaaatcatattattttcattattaatgactactttaaataaacctcttggatcattgttaattttatgacgaggtatagcacttactaaaagttgatgttcagtgtaatcataatgttgagcggcagcttctttactagttaatccaacacgtgataatggtggatctataaatactgtataaggtacgctgcctctattgttagtcgtacgtgactgattaccatataaagctgatttgataattcgataatcatctaaagatatatacgtaaattgaagtccgcctttaacatcacctgcagcataaatatgcggcacagttgtttggagatgagcattgactttaatttcgcctctgtcgcctaattcgatatcagtattttctaatgctaaatccgtattcggtttgcgtccgatagccaaaagtactgcatcagcctcaaagttaccaacgttagtatggacagttgtatgataattgtcagatgacaattcagtcgtttcaacatttgtatgcaatgcaatgcctttattttctaagtcagtaatagcatgtgcaacgacatcttgatcttcgcgtggcataaatgattcaccacgttctaatactgtaaccttactacctaggttcgcaaacattgaagcaaattctaaggcgatataaccgccacctacaataacgaggtgcttaggttgatagttaatgtttaataaacctgttgaatcgaagacgtgtttagcttgatcaagacctttaatgttaggttttacagaggtagcaccagtattaataatgatatgaggtgcagtaatactatcggcgatatcgccatgctgatctaataaattcacttcagtattagatttaaactgcgctttaaaatccagtacatcaatgttgctatcgtctgctaataagtggtaatttttattgtttagcgcattgacaacatcgtttttacggttataacttgcttcaaaagatttgccttctaatccatcatgtacaagtgtcttcgaaggtatacatcctatattgatacaagtgccgccatacattttcggagattgttcgataactgcgacgtgttgacctgttgatgcagcatatttggctaaagttttaccagctttcccaaatcctattacaattaaatcatatgttttcatgacataaatcctccttttgaatgtcttcaatgacatctttgattgttttttctttataaaaattaataatgatattctgttcgtcttgttgataatgtgacatggtagttgcaatattacgagcaatttgacagtgactgccttcgtcgccagtaaatagtcgtgtgtgatgttctttctctaagacaaaatgtttatataatgttgctaaagagacatcagcgctacgatcatttgctaaatatccaccatctttacctcgtattgtgtcaatcatttttaaatcgacaagttgagtcgtcacgcgtcgtaattgaacaggatttaaacaagttaattcagctaatgaactactattgaatttttctgaatgatgcttagttaaaaaagctaatacatgcacggcaatgttaaattctaaattcaatgtttctcacctcataattgtaactgtattagttacaattaaaaatcattttgctcaatgtgtcaatacttatgtttgaaaagtgttgaattaggtgtgattattttgatgatttattgtttgaaagttgttgcattaacggtgagattgcacaattgaaattttagttatgtataaactgatagatatgaaatgaatattgaaaatgagggcaataaaatattgaatgatgatgttgtgtgattttgtaaacttattcgtattttagagacgttttgatatttcgcatgatgaagaaacacttttaacaactggtgacatattttaatagtaaatatattttgagatattaatatatttaatgttaaggatgttgtcgcaataaaattaaaatattgaaagataatttttattgattaattgcgaatatacaaagacaccattatatccatatgctaaaataagaaaaaggcgacatgttatctcaatttacttgcatcgagactccctttacataagaaataatcatcgccgagttataaaattttacaattttgtagatgtaaaaagcatttgattttaaatagtttgaaaattacatatttttggaaaacgagcatgccgatgagtattgacatgtatttagacagatctcgaaaccaagcttcaagtgtgggtaatttgagtcaatcaatgaattcaaattatgatgcgttggaaaaagcaattactcaatttatcaatgatgatgcacttaaaggtaaagcatatacgtcagctaagcaatttttcagtacggtgctaattccattatcaacaagtatgaaaacattgagtgatttaacgaatcaagcttgcgataattttgtgtcacgttatacgagtgaggttgatagcatatctttaaaagaatcagagcttgaagaagatatcagatcattaagtcaacaaattacgcgatatgaaaatttgaataacaatttgaaaaagcatgcttcggataatcagcaagccatttcatcgaaccaacaaataatacaaacattaggtcaacaaaaacatgaattagaagagaagctacgcaaattgcgtgagtttaatcaaaaatcaccagaaatatttaaagaagttgaagaatttcaaaaaattgtccaacaaggacttacacaagcacaaaatttttggaacttttcaacaaatcaatttaatattccttcaggtaaagaacttgattgggccaaagtaagtcatgagaaatatttgaaagttgctatggggaaaattgaacaaaaagcagagaaagaaactttaaataaagcagactttgctgttataaaggcatatgccaaagaacatccagaagacgatatcccgaaaagtataatgaaatatataaatgacaataaagatagtattaaacgagatataggattagatatcacgtcaacacttttagagcaaggcggtataaatgcaagtaaattcggtgtatttatcaatacagcaggtggagtgaaaggcccagccggtccaaattcatttgtggaagtcaaacgtacatcaggtaatgtgtttatagaaaatggtagtaaatttgcaaaaggtggaaaatacctaggtaaaggtgttgcaggtgtaggatttggtataggtatgtatgatgaccttgcaaatgatgataaaacatttggtgaggcgttgtcgcataatgctttaactacaggaataggtactggtgctggaattgctacttcagcaacaatagtcgcacttgcaagtaacccagttggttgggctgctttaggaggtttggcagtaggtattggagctacccaccttgctgattgggcttaccaagcaaatattttggggttaaaagataaaactgattgggttggacataagatagatgaaggtattgataatttcaaaaagtcaacggtaagtacagtagatagcattggaaatgtcgttggtgaagctacaaaaagtattagcaatcatataaaccctatgaaatgggagtggtaagtgttgatttgtgaatcaaaaaatataaataagaacccgagatataaaattataaaatataagaacgagtttttaatggttgatgtaactagttcttggattttcttcttcattccaatgcttaattggggtgtacctaagaaatatgcgaagattagtcaaagtgagtttgaagaattaaatacatttacaccgaaaaatagtagctcagctggatggatagcaggtgggggatcagttttattggcagtattgacgagaaaatatatacagttgttaaatatacaagttaatcaaattgctgtgaatattttatgctgtctcgtacttttgggggttttcctttcagctttatatattaattcgaaatctaaattaaatgtttatgatagaaataactgtgatgaaaagataattttaataccaacttttaaaaatttatacttaatgctcctttcgtatattatttttggtggtttaagcatacttgctttttatatgtttatcacagaaggtattcaaaacatcattttatttattacttggattatgcttgtaataatgttcttacttagtaatgtagctttggtagtcaataaaaaagtatatgttataaaaaggtagaaaaatgactaacaatattatgttaaccgttcttcaaataaagattactaagtaaaagtaggaagtgataaacagtgctttgtgaatctcgagtcattaataaaaacccaaaatacaggatcattaaatataatgaggagtatttcatggttgatttagtaagtacttggattgcttattttttgcccatgattaattggtttattcccaaaaagtacgcgaaaattagtagagaagaatttgaaagtttaaatattgtcaaacccgctaaaaataatactttctggcctgttgcaggatttgcagtgttattaacaaccttaacaagaaaatatatttatttgcttaatatccatttagaaaaagaattagttatattaacatgctgtatgatacttctaggtgttttcgcattgtttatatatataaatacaaaattgaagttacatatttttgataaaaataaaagtaataacgaaaagatcatattaatacctacatttaaaaatatttgtttatccttatttgcttatatattatttggtggattgtcaacaatggctctgagtatgttagtaactttatcccctcaaaatataatagaatttcttgctttaattggcatgactgcatgcttctttctactgaatatgtcatcggttttagataaaaatattcatgttattttaaaaacaaataagtagcaaaattgattaacttaggtagtatcggatacttaaatgttggttcataaaaagcaatgattttaaatcgaggagctatcttagaacagggaaataaaacagctaaagttataaaaagcgaattaataactaattatattatgttagccactcttcaaataaaaaataattagaataaggtggaattgataatcaatgctatgcgaatctaaaatcatcaataaaaacccaaaatatagaattattaaatataatgatgagtacttaatgatcgatataataagcacttggattagtttgttttttccttttattaattggttcatcaccaaaagatacgtcaaaattagtagagaagagtttgaaaatttaaatattgttaaacctgctaaaaagaatgttttttggccagttgcaggtatctctactttattcgcagttacattaagaaagtatacgcatttacttgacactcaacttgataaaaaattagttattgccatatgttgtatcacatttatagggattttaatattttatgtacgcctaattaaaaaatcatctttaaatatttataatactaaaaataaaaggtcgaaaatcatcttaataccaacactaaaaaatttttgtttcacattgttcggatatgtttttttaattttttggacagtgattttctcatatgctctattatcaatgagttatcaaaacataatagtatattttgcttggattacagcaataatgggtttttttctagtgaatatagctttaattatagataaaaacattcatgtcatacttaaaaattaaatggtggtaataaattcagattaaagatatgcaaataacaatgaataaaatttttaatgatagtaagttgataatattttaatgtcttttgaagtatcgaaaaatgtattacacataaaattaaagggatgtggagacattgctttgcgaggtaatagctatatacaaaaatcccaaatatagaattattaaatataatgatgaatatttgatggtgaatataataaataattggttagttttatttattccattgcttaattggttgacaccaaaaagatacatcaagatcagtcaagaagaattagaaaatttaaacactttcaaacctgctaaaaacaatgcattttggccagcattaggcagttcagttttatttagtgtgacttttagaaagtatatgcctttatttaatgttagattggaaaaaacaatagtaatagccatattttttgttgtatttcttggtattttatttttctacctaaatttaaatcgtaggttagcattaagtgtttttactatgaataaagaaaaaagtcagaaaatgatattgctacctaatttaaaacattttttctttataatatttgcatatttatatttcggtggtttttcatttttcactttatatgccctgataactatagatgttcaaaatataattatatttatctgttggggtgcagtaactatgtttttcttttttataaacattgttcccattggcattaaaaaagctcatgtaatacttcttaaaaaaagctgaataataaaggagttttttaaatctaaaattattaaatttaatataaaaattcgactcatagatagaatgaataaaaatccgaaatatagaattatcaactacaaagatgaatgttttataatggatatcccatgttaatattaacagttttaatttctttgttatgcaaatcaaaacattatagtatttctaattaaatttttaatggctttaatgttgtcgttcttaaatgtttttcaatttctgattcaaaagtacatgtaatttaaaggctaacgagcaatcgcgctatgtgaatatcaacttaagcaatacttattttaactgagttctacataacatttttctaatacaccgcccaaattcaaaccctaattcaaacatttggaagttgtattaaatcatgatagtgtgatagtggaaaagttataaagataaggagctgggtctaatgaagcaatttgtaaacttaggtaaatctgatgttgaagtgtttccaatcgcacttgggacgaacgcagtaggtgggcataatttatatccgaacttagatgaagaacaaggaaaagatgttgttcgtcaagccattaatcatggtattaatttattagatacggcatatatttatgggccagaacgatcagaagaattggttggagaagttgttaaagaatatccgcgagagcaaattaaaattgctacgaaagggtctcatgaatttgatgaaaatcaagaagtacatcagaacaatcaaccggaatatttaaaacaacaagttgagaatagtttgaaacgtctacaaactgattatatcgatttatattatattcattttccggatgacaacactccgaaagatcaagcagttgcagcattacaagagcttaaggaacaagggaagattaaagccattggtgtatcaaatttcacattagatcaacttaaagaagcaaataaagatggttacgttgatgttgtacagttagaatataatttattgcatcgcgaaaatgaggcagtattacaatattgtgttgatcaccaaatcacatttattccatatttcccattagcatctggtattttagctggaaaatatgatgagaacactaaatttagtgaccatcgtactacacgtcgtgattttaaaccaggtgtatttgaagaaaatgtgcgtcgcgtaaaagctttggaaagcatagctgcagcacatcaaacttcaattgcgaacattgtattagcattttatttaacgagaccagctatcgatgtgattattcctggtgcaaaacgtgcagaacaagtcgttgaaaatattaaagctgcagatatcgttttatcagatgatgagattcaatatatcgatgaactgtttccaattgaagactaaatgaattgtatttaatggtgacatatgtatctaattcatcatgaattagccccgtatcacaaacgacgttatataaggtatgacgaaatttcgtcaaatttatataaaagttgtaagcgttttactattcggtaggcaaagcttatgatagtataattaggtaacgaaaaacacagatatttattaatcaaaagtgaggttaggctaaaatgattactgttttgtttggtgggagtagaccaaacggtaatactgcacaattaacaaaattcgctttgcaagatctagagtatcaatggattgacgtgacacaacatcagtttaaaccgatacgtgacgtgagacatacaacagagactattacttcatatgacgatgactatttgccgattctagataaaatattggctagtgatacaattatttttgcatcaccagtgtattggtatagcatttcatcgccattaaaagcatttatagaacattggtcagaaacactacaagataaacgttatcctaattttaaggcacaaatggccgaaaaggattttagagttattttagttggtggagattgcccaaaaataaaagcgaagccagcaattactcaaatgaaatatagtttagactttttaggtgccactttaaatggctatattattggaactgctgaaaagcctggtgacatcatgaaagacaactatgccttagcacgtgcgacagaatggaatcaactattgcaataagacatacctcatactaaacgaagtgattttttgcttcgttattttttatttttaattttaacggaaaatataaatatataaattgaatagacaatcattgtttattaagtattgagcaagttgtggtataatgccgttattaaaacttgttaataaggggagaaagtcatgttcaaggtaagacaagcaactgaaaaagatgttgttcaaattagagatgtcgcaactaaagcttggtttaatacatacttaaatatatacgctgcgacaacagttaatcatttgttagaagcttcatataatgaacatcatttaaagaaaagacttcaagaacaattattcttagtcgttgaagaaggtaatgacatcgttggctttgctaactttatttacggtgaagaattatatttatcagctcattatgttaaaccagaatcgcaacatacaggttatggtacagcattattaaatgaaggattatcacgttttgaagataaatttgaaggtgtttacttagaagtagataataaaaatgaagaagcagtagcttactataaagagcaaggttttaaaatcttacgctcttatcagccagaaatgtatggcgaaaagttagacttagcacttatgtacaaagtattttaagcgcgttaaataaaaaaattgaaaaggaggggaataatgactaacgcatatgtagatttaaaattagtagaagaaaaagtttttaaagacccgatacatcgatatattcatgttgaagatcaattgatatgggatttaattaaaactaaggaattccaaaggttacgtcgaattagacaattaggaacactgtacctatcttttcacacagcagaacatagtcgctttggacattctttaggtgtgtatgaaatagttagacgattaattgatgagtcatttattggtcatgatgcatgggacaataaagatagaccgttggcattatgtgctgcattattacatgatttaggacatggtccattttcacatagttttgaaaaaatatttaatacagaccatgaagcatacactcaagcgattattactggagatactgaggtgaatgctgtattacgtaaagtatcgcctgagtttccaagagaagttgcggaagtaattaataaaacgcatcataataaattggtcatttcgatgatttcttcacaaatcgatgcggatagaatggattatttacaacgtgatgcgtatttcacaggtgtgtcatatggtgcttttgatatggaacgtattttaagattaatgcgaccttctaaagatgaagtactaattaaagaaagtggtatgcatgcagttgaaaactttattatgagtcgttatcaaatgtattggcagatttatttccacccagttagtcgtggtggagaagtgctgcttaataattgtttgaaacgcgcaaaacagctttataatgaaggctatgaatttaagttgcatccacatgattttattccattttttgaagagacagttacgattgaacaatatgttgaactcgatgaagcggtagttacgtattatttggaaaaatggacaaaagaagatgatgccattttaagtgatttagcaagtcgatttattaatcgagacttatttaaatatattccatttgatggctcaattattacaatatcagaactgcaagaactgtttgaagcaggtggtattaatccagattattattttgtgagtgaagcattttcggatttgccatatgactatgatcgaccggggtcaaatcgcaaaccgattcatttattaagacaagatggtacgattagagaaataagcaatcaatctttagtcattcatagtattacaggcattaatcgccaagactataaattatattatcctagagaaatggttgcaaagattaaagataagacaattagagaagctattgaaaatttgattaacgagcttaattaaacagggctaaaattgttatcgttaaatatggaggttatatcattgtctgagaaaaaaggctttaattttaatatcattaagaatgaccctttagacggtcataaaggtacaaatatcggttcaatcagcttagacaatattgcgccagtttttattgatgttgctaacaaagaagcatttattgatattggaggcatgcatgctcgcgccaaagttgaaaaaggcgtgaaatggattactgataaagctgctgttgaaggcgatgaagctaaagaatattggttgtgttgggtaacaacagaacgtaatgaacaaggaccatattatgctggtttaacagcgtgctatttattagtgaataaagcaattcgtcgtggttataaaagtatgcctgaacatgttaatatgatggataaatcaatgaaacatcatattatcattgatcatattggtgacgagaataaagctattttaaaagactttttaatgaaccatgatgaaggtatgtggaagcattcttctgatgctttacatcaagcatttaattaaatattagaaactaaaatttcccaattaatctatagagatatgattcatttctcaatgacgacgtaaatcatgaggtgaaaataaagtcttagattgattgggagtttttttaatttttttgaaattaaattaatctgtagttaataaaaaatttgaataactgacacatttttttgatcatagctatatactttgtgaattaattcacattataataagagtgaagataagagtattataaattatctttaaataaatatatgtgaagtaaaaattacacgttagcatatcgattatgtcatttcttttaacatattaactagggaaacgttaaaagttaacggttgatatctaacaaaaaacaaagtcacagtagtatgttttaatttggcgtctattacaaataaaaattacatctataattattcgttttcatttttgaaagtaatcaccaattaatatcatacatactggagtgactataaggaggacattattatgagagcagcagttgtaacgaaagatcacaaagtaagtattgaggacaaaaagttaagagctttaaaacctggtgaagcattggtacaaacggaatattgtggcgtttgtcataccgatttacatgttaagaatgctgattttggtgatgttacaggcgttactttaggtcatgaaggtattggtaaagtcatcgaagttgcagaagatgtagaatcattaaaaattggagaccgtgtgtctatcgcttggatgttcgaaagctgtggaagatgtgaatattgtacaacaggtcgtgaaacactttgccgtagtgtgaaaaatgctggttatacagtagatggtgcaatggctgaacaagttattgttactgcagattatgctgtgaaagtacctgaaaaattagatccagcagcagcgtcttctattacatgcgcaggtgtgacaacttataaagctgtaaaagtaagtaatgtaaaacctggacaatggttaggtgtttttggtataggtggtttaggtaacctagctttacaatatgctaaaaacgttatgggggctaaaattgttgccttcgacattaatgatgataaattagcattcgcgaaagaattaggtgcagatgccattattaattctaaaaatgtagacccagttgcagaagttatgaaattaactgataacaaaggattagatgcaacagtggtaacttcagttgctaagacgccatttaaccaagcggttgatgttgtaaaagctggtgcaagagttgttgccgttggtttacctgttgataaaatgaacttagatatcccaagattagtgcttgatggtattgaagtagtaggttcacttgttggtacaagacaagacttacgtgaagcgtttgaatttgctgctgaaaataaagtaacacctaaagttcaattaagaaaattagaagaaatcaatgatatttttgaagaaatggaaaatggtactataactggtagaatggttattaaattttaaaaatatcaaatgactttatagataaagaaggtagtgctctaaacactatcattataatcaaacacgaggttttcatgtaagatagtgaaaatctcgtgttttttggttttgaggtgttatttgtattttataaaatggcttacatatatgaagcgttgattaagtatgaaattgttaattaattgaacctatttagctttaagaaggcataacaagatgaccttattttatgctataatatttctattatgcgaagattaaggtgagtagtaaattggataaaaaagtaagtattcaaacaaagcaagtgttgaaacagcacaacgaaaaagaaaaatttgaatttactactgaaggaacttggcaacaaaggcaatctaactttattcggtatgtagaacaaattgaggatgcaacagttaatgttacaataaaagtggatgatgatagcgttaagttgattcgtaaaggcgacattaatatgaatttgcattttgttgaaggacaaacgacaacaactttttacgatatatcggctggacgaattccactagaagttaaaacattacgcattttacatttcgtaagtggagacggtggcaagttaaagattcattatgaattatatcaagataatgaaaaaatgggttcttatcaatatgaaattaactataaggagataggcgaatgaatattattgatcaagtgaaacaaacattagtagaagaaattgcagcaagtattaacaaagcaggattagcagatgagattcctgatattaaaattgaagttcctaaagatacaaaaaatggagattatgctactaatattgcgatggtactgactaagattgcaaagcgtaatcctcgtgaaattgctcaagcgatagttgataacttagatactgaaaaagcacatgtaaaacaaattgacattgctggtccaggattcattaatttttacttagataatcagtatttaacagcaattattcctgaagcaattgaaaaaggtgaccaatttggacatgtaaatgaatcaaaaggtcaaaatgtattgcttgagtatgtttcagctaaccctacaggagatttacatattggtcatgctagaaatgcagcagttggtgatgctttagctaatattttaactgcagctggctataatgtaacacgtgaatattatattaatgatgctggtaatcaaattactaacttagcgcgttcaattgaaacacgtttctttgaagcattaggtgataacagctattcaatgcctgaagatggctataatggtaaagatattattgaaataggaaaagatttagcagagaaacaccctgaaattaaagattattctgaagaagcacgtttgaaagaatttagaaaattaggcgtagaatatgagatggctaaactgaaaaatgatttagcagagtttaatacgcattttgataactggtttagtgaaacatctttatatgaaaaaggtgaaattcttgaagttttagctaagatgaaagaattaggttatacgtatgaagcagatggtgcaacgtggttacgtacaactgattttaaagatgacaaagacagagtattaattaaaaatgacggaacatatacgtatttcttaccggatattgcgtatcactttgataaagttaaacgtggtaatgatattttaattgatttatttggtgctgatcatcatggatatattaatcgtttgaaagcatctcttgaaacgtttggtgtggatagcaatcgtttagaaatccaaatcatgcaaatggttcgtttaatggaaaacggtaaagaagttaagatgagtaaacgtactggtaatgccattactttaagagaaattatggacgaagttggcgttgatgctgcacgttatttcttaactatgcgtagtcctgatagccactttgattttgatatggaattagcgaaagagcaatctcaagataacccagtttattatgctcaatatgctcacgcacgtatttgttcaattttaaaacaagcaaaagagcaaggtattgaagtgactgctgcgaatgattttacaacgattacaaatgaaaaagcgattgaattgttgaaaaaagtagctgactttgagcctacaattgaaagtgctgcagaacatagatcagcacatagaattactaactatattcaagacttggctgctcatttccataaattctacaatgctgaaaaagtattaacagatgatattgaaaaaacaaaagcacatatcgctatgattgaagcggtcagaattacattgaaaaatgcattggcaatggtcggtgtaagcgcacctgaatcaatgtaagaacatttatatacactccaacgttgagtttctcgaaagatactttgtgttggagtgttttttattaggtatgtgacatattggggaatgcttagtatgtgaataaggttaaagaatacagttggcttgcttgcgcagcaactgcaaaagagcccctaatcgctaaagttcaaggggagttaaggaatacagttggcttgcttgcgcagcaactgcaaaagagcccctaatcgctaaagctcaaggggagttaaggaatacagttggcttgcttgcgcacaactgcaaaagagcccctaatcgctaaagttcaaggggagttaaagaatacagttggcttgcttgcgcagcaactgcaaaagagcccctaatcgctaaagttcaaggggagttaaagaatacagttggcttgcttgcgcagcaactgcaaaagagccactaatcgctaaagctcaaggggagttaaggaatacagttggcttgcttgcgcagcaactgcaaaagagcccctaatcgctaaagctcaagggggttaaaggaatacagttggcttgcttgtgcagcaactgcaaaagagcccctaatcgctaaagctcaaggggagttaaggaatacagttggcttgcttgcgcacaactgcaaaagagcccctaatcgctaaagctcaaggggctctaaaaggaggatgtaaatgttaggaactgatgaattgtataaattgttatataggcatatgggacctcaaaattggtggcctgctgataatgacattgaaatgatgttaggtgcaattttagttcaaaatactagatggcgaaatgcagaaattgcattgaatcagattaaagaacacacgcattttaatccaaatcatatattagaactacctattgaaacgttacaatcattgatacattcaagtggtttttataaaagtaaatcactgacgattaaaacattattaacatggttagcacgacatcatttcaattatcaagagattaatgagcgatataaagctgaattaagaaaagaattattatctttgaaaggtattggaagtgaaacagcagatgtcttacttgtttatatattcggacgtattgaatttattccagatagctatacaagaaaaatatatgataaattaggatatgaaaacactaatagttatgatcaatttaaaaaagtagtcacattaccaaatcattttacaaatccagatgctaatgaatttcatgccctgttagatgtatttggtaaacattactttagagacaaagatataaagaattatgattttttagaaccttactttaaaaagtaaacgctgtgaagttagatagatgagtttatatgaaatataaaaaataatttactattttcttttagtatgtggacttatataataaatagaagcatataaagaaaaaacagttgtttgtgcagcaactgcataaaaacctctaatcgctaaaggtgaagaggaatgcagttggatgctaaggcacaactgcataaaagcgtctaatcgctaaagctcaagaggctttaaaggaacgcagttggatgctaccgcacaactgcataaaagcctctaatcgctaaagatgaagaagaacgcagttggatgctaccgcacaactgcataaaagcgtctaatcgctaaagcgaaaagtgggattaaaaaggagatgtgatagtgtgaagaaatcgttaattgcttttattttaatttttatgcttgttctgagtggctgtggtatgaaagataatgataaacaaggtagcgatgataatggctcgtctaaaacgccgtaccatagaattgattcgttaatgcctagtaatactgaaattttatatgaattaggattaggtaaatacatagttggtgtttcaacggttgatgattatccaaaagatgtgaaaaagggtaagaaacaatttgatgctttgaatctaaataaagaggaacttttaaaggcaaagccagatctaattcttgcgcatgagtcgcaaaaggcaactgctaataaagtattgtcatcattagagaaacaaggcatcaaagttgtgtatgttaaagatgcacaatcaattgatgaaacttacaacacatttaagcaaattgggaaattaacgcatcatgaaaagcaggctgaacaacttgttgaagaaactaaagataatatcgataaagtcatagattcaattcctgctcatcataaaaaatcaaaagtatttattgaggtttcatcaaagcctgaaatatatacagcagggaagcatacattcttcaatgatatgttagaaaaattagaagcccaaaatgtttatagtgacattaatggttggaaccctgtaacgaaggaaagtattattaaaaagaacccagatatattaatttcgacggaagctaagacaagatcagattatatggatatcatcaaaaaaagaggtggattcaataaaattaatgctgtcaagaatacacgtattgaagttgtaaatggtgatgaagtatcaagaccgggtccacgtattgatgaaggattaaaagaattaagagatgcaatttacagaaaataaaccattctaattatgccccttattgctacatgtaaaaaaatacatgtttgagataaggggtttttaaaatatatttagtgaatgatagcaacgcgagtatgtgattgctataatgaatgtaattatcgatgaaagaaaagtgaatactatgacatttaataaagtattattgagctggatagtcatattgattataacaactagcatatatctattttggcagttgggggatatcaatgatgtatttaaccagtctattttaatcaatgttagattaccgagattattagaagcattgttgacaggtatgatattaactgttgcaggtcttatatttcaaacagttttaaataatgcattggcagatagctttacattaggattggcaagcggtgctacatttggttcaggattagcattatttttaggattaacaacgttatggattccagtattttcaataacatttagtttaataacattaataactgtattagtcattacgtcggtattgagccaaggctatccagttagaatcttaatattaagtggtttaatgattggtgcattattcaattcacttctatattttttgattttattaaaacctcgcaaattaaatacaattgccaattatctgtttggtggttttgctgatgcagaatactcaaatgtatccataatagcaatcacatttatcattgcactgtttggtatatttatcattcttaatcaactaaagttattgcaattaggagaactaaaaagtcagtcactaggcttaaatgttcaaataattacatatatcgcgttatgtatagcttctatgataacggcgataaatgtcgcatatgttggcatcattggattcattggtatggtgataccacaactcattagaaaatggcagtggaaacaatcgttaggaagacaattggctttgaatattgtaattggaggacaaataatggttatggcagattttattggtagccatatattgtcaccagtacaaataccggcaagtattatcattgcattaattggtataccagtgttattttacatgctaatatctcagtcgaaacggttacactagcacatgacatttgctaaaataaaaataactataaacataaagagggcataagcgatggatttgaatcaaattaaagcagttgtatttgatttagaaggtacgttgttggacagagttaaatctcgagagaaatttatcgaagagcaatatgaacgatttcatgactacttaattcatgttcaactggcagattttaaaaaagcatttattgagctagatgacgatgaagataatgataaacctgatttatataaagaaatcattaaacgtttccatgtagataggttaacttggaaagacttatttaacgattttgaaatgcatttttatcgttatgtatttccttattacgatactttgtatacactagaaaagctatcgcaaaaaggctttcaaattggtgttatcgcaaatggtaaatctaagattaaacaattccgattacattcacttggtttgatgcatgttattaattatttatcaacatcagaaacagttggctttcgtaaaccacatcctaaaatttttgaagatatgattgatcaactaggggtattacctgagcaaattatgtatgttggcgatgatgcgttaaatgatgtagctccagcacgagctatgggcatggttagtgtatggtataaacaagaagatgcagaaatagaaccgctcgaagaagaagttgattttacaattacaacagtggaagaattattaaccattttaccaataaaaattgataataaaggagaaaattatggatctatttactagaaaagatggaacatcgatacattacagtacattaggtgaaggctatcctatcgtattgattcatactgtacttgataattattctgtgtttaataaattagcagcagaattagcaaaatcatttcaagttgtgttaattgatttacgtggacatggctattctgataaacctcgtcacattgaaataaaagatttttctgatgacattgttgaattacttaaatatctatacattgaagaagttgcatttgtatgccatgaaatgggtggaattattggtgcggatatttcagtacgttatcctgaatttacatcatcacttatgttggtaaatccaacatctattgaaggtgaattaccggaagaacgtttatttagaaaatatgctcatattattcgaaactgggatcctgaaaaacaagataaatttttaaataagcgtaagtattatcgtccgagaaaaatgaatcgattcctcaaacatgtcgtagatacaaatgaaatatcaactaaagaagaaattcaagcagttaaagaggtattcaaaaacgctgatatttctcaaacttatagacatgtcgtagtaccgacaaaaattattgcaggagaattcggtgaaagaacaacaagattagaagctaaagaagtagctgatttaatccaaaatgcagactttgaagtatatcaagaatcaagtgcattcccatttgttgaagagcaagaaagattcgtcgaagatacagcttcatttatcaacaaacatcacgatgaaaagcatgtttaattttaagtgataagtgaaatataaaagtagtaattattatttgtaatataattgtaatatggctgttgttttagaaatgattgttgtataatggttgtgagcacaagacgatataaataaaaggagagagtgcttatgaaaaagctactaacggcaagtataattgcatgttctgttgtaatgggagtaggcttagtgaacactagtgccgaagcagcaagtggcaactctattgatactgttaaacaattaattaagggtgatcagtcattagaaaatgtgaaaattggcgaatctattaaagatgttttaactaagtacaaaaatccgatgtattcttacaatgaaaatggaactgaacattattacgaattccatactaaaaaaggtatgttattagtaactactgatggtaagaaaaacaatggtaaagtaactcatatttcaatgatgtataatgatgctaatggtccaacatatcaagctgttaaaaattatgttggcaaagcagtaacacatacggaatatagcaaagttgctggtaattttggatatattgaaaaaggcaaaacgacttatcaatttgcctcagcaccaaaagataaaaacataaaattatatcgtattgatttggaaaaataataattaaattaatcgtgcttaaccgacaagttaaatcgcaatacttgtcggttattttattacatggcataatacagtgaatattaatttttatgatttgcgaaggggatattaaaccaatacaataaataaagatgtttcattttaaaggagtactaccaatgcgtattaacgataaaattttactagaaaatatagaagattactttaatcataaaggtttatcaccgcatttgattgatgatattaaagagaaagtaattactgatataaaaaattctgaaaagaaagatcaagattatattgaatataaaagaaaatctccagcacaaatcatattaatgattcaaaggaatttgtttgctttacaaatgaatccagttattttctttattttaaatttcattctcatatcctatttatatgataaacagtatgttcagtttcaagctattactggaatgagtctattttattgtttagtgatttttccaatgactattgttgtatacctaagggtgtctcaaaagaattacttgcgtagtaataaaatagaaatgattatgggtacaattatcgctatcatatccctgttattaattatattacaagcatttaatattacatggggcgttataccaattacaaattttggacatcaatttttctttttcattggtattattttagtaattgccggcattttttataagcgacttgagttttcgggaattggcttattattttgtcaaaaaaccgtagatgcaatgattcataatccacaatcagcccagactttttcattaattatatggatattattagtagttctagttatatatttcacaattagattatcttcacgtacaagattataaatatgataaaactattcacttgattaattgtattaattgagatgaatagtttttttattgttggaataacttttggtaatttataaataatttaaaaaaattgtttataaaatggaagcgtacatagaatgaaggttgggtatatagtttattgagggaggtgtcacaatgaataaagtcacaattaatcctcaaatccaattaacttatcaaattgaaggtaaaggggatcctataatattacttcatggattggatggtaatttagctggatttgaagatttgcaacatcaactagcatcatcatataaagtacttacttacgatttaagaggtcatggcaagtcttctaaaagtgaatcatacgatttaaacgatcacgttgaggatttaaaaattctaatggagaagttaaatattcatgaggcacatattctaggacatgatttaggtggggtagttgctaagttatttacagataaatatgcttatcgtgtaaaatcattaactaccattgcatcgaagaaagatgacttaatacacagctttactcaattgttaatacaatatcaagatgatatagcgggttttaataagtctgaagcgtatattcttttattttctaaattgtttagaaatcaagagaagacgatgaaatggtatcaaaaacaaagaatatatagcattaagtctgaggatgatagtgcggtggcaattcgttcattaattttgcataaagatgaacctatgtatttaaaaaaacgtacatgtgtacctactttgttaattaatggggaacatgatcctttgattaaagataagaatcattttaaattagaatcgcattttttaaatgtaacgaaaaaaatcttcgaacattcaggacatgcaccgcatattgaagaaccagaagcatttctaagttattatctaaatttcttaaaaagcgtatcataatatgtgatatatcaacctagggcataaagtccttaggcaatgtgaaaaagctgattactactcattatttgatagaaatcagctttttttgaaatgtatttgatatatactgctcgttatacggctatcttccttatattaagtgctattagtgcaaaaccgcttaacaattaggtaaaaaaagacataaaaaaaggaagtttaatagaatgtatcatctatcaaacttcaccaaattgcgctaaacaaaattatagttcaatttcgttgtttgcttcagtgattcgtttatttactcgactcaataatgattcgatttttttacgttgttgtgcattaacaagaattaatacagttctttcatcatgctcattacgttttttatcgaagtaatcttcttgagataaaattttaactgctttaacaacttgtggttgtttgtagtttaaatgattaataatatctttaagatagtattctttctctttgttttcgctgatgtatgtcaatacagcgaattcttcaaagctaattgaaaattcctttttaattaaactttttaatttgtcagcataagtgaccattgataacaactcaaagcaatcattgatttttgtaattgccatgtttaaaacctccctatttgatgcatcttgctcgatacatttgcccgataatatattgatatctaatctttatttattatagatatgttagtcataattttgcattaaataagttttattaaatatatttaatgctctattatttagttaattataactaattaaaaatgagaagtaaacaaaaaagtgtttataaaacaaattattcattagacacagtgattgtatttctgggttagcatttggattagtcaaaaagatcagcattttttataatttaccttaatttaatcgtcagtacaaggtaatttatttaatgaaacgatttagcgcaattaaatgtttcaatattcaatgtgtatctaaagtgattcattgtcatagcttaacgcttttaagttaacttcttctaatatttatacccatttttcgaacttttatcactaaaaaagaaaaatttttataatttttttaatttagtaattctcagtgcagttttaatgataagaaaaacacacttttttaatgacaaaagtaaaactatagcactttaaagtaaatgtatagtaatccgattgataacaagtaatcaatattagaaagtacgattatggttcataatttaaagcatcttcaatctttaaagtcgactcaatgaatgaattaaagttgtacattttgacttatttttaattaattgaataaccaactatgaaatattagcacgaataacataatttttgctattaatttggtgtaaattattaaaaaataacattaatttaggtcttaagaatgagttgactatcgaatttgctaaattaaaatttgttgtgtcaaagcatactacccatattagtacttattaaaactaatttagactgcaaaaaaatagcttatcacttttaaaaataattacaagttaaaatgataagctaaaagttaatttaaaataatcttaaaagtataatccctgtcaaaatacataatagaccaatagtttttctggatgtcattgctattttaggtgaaccaaataatccaaagtgatctatcaatatgcccattagaatctggccaaacatcccaataagtgttgttaatgctgcacccatatgaggcattaagataatgttagctgttacaaaagccatgccaagtataccgccagtaaaatagataggttttaatttaccgaattttaaatgacttgtttttagttttaaagaacgattaaaaatagcggttaaaatcaacaacgttattgacccaattgtaaatgatactaatgatgcaaaggctggtgaatgagtatgacttgctaaagcactattaattgtcgtttgaataggtggaaagaaaccaaatataaatcctaagagaagccaaaacaataaatacttttgatcagttagtaataaattattcttgttaaattgattcattatgacgataccgataatgagtaacaatactccaattgctttaattaaattaaaatcatgaattgtagcaccaaataagccaaatgtatcaataatgacacccataataatttgacccgcaactgttgcaattacagttaatgttgcacctaattttggcaataacaataaatttccagttaaaaagctaaccccaagcaaaccaccgactatccatgtgtagttaaatgattgattattgtaaaagtgaatagtaaatacttctggattgataatgatgtttaaaataattaaacaaattgttccaactgaaaatgaaatgaatgaagtatagaaaggtgatttagtatacagtgatagtcttgaattgacagatgtttggataggaataagcattccaactaggacaccaatgatatagaaaagaagcatatgaataaagtctcactttccaaagttaataataaaaatcatatgtatacattatcattatagagaaaatatacaactcatttttaataatgttgaaaaaaacaggacattgacacaacaaaatcaccctagacaatcatgatgaaagtctagggtgttagtatttatactaaattaattacgctttctttatatctatttcttatcttcaaataaaacggtcgtcgttttatcaataatttgagcagaatgtactttggtgatagcgccactattagactttaaaatatttaaatctactaatgcattcatactatcacgtgcaacttgctcggttatgatgttgtttaattgtggtaattgcaatttgacaggtttgtctaatgaagatttaaaacttaattcaagtgttttggtcatgaaagtgtcctcctgattaaattgatacagatttgatgacttcgatgttattgtatgtttctccagtaagtcgctcgataagtttgctaaatgttttaatttggtcgtttgatacttcaggattaatattggcgaatcgacgtttaaattctgtttgtttaccatttgtatctagttttgtaaatgataatacaattgtaatgtgatttgttttactcatattttaaaacctcctttcacactatatatcgaaagaaaaaaataattgggttaattttattattcttgtttaaattctataaaaaaggttataattatatgtgacttaaatacttaatgtttatgattaagacacttaaagcaaggagggacatatgaacaaggtagaagtaattaaatgcaatgatgatattaataaaatgtatgacgcgctcaaagctcgatctgatagggattatttgttttttaaattagctatacatagtggtatgaaaattacagaattattaacaattaccgttgaagatactaaacgactgattgaaaaggggacactaagcgaattgtgtaaagcccattatcactcattgattaaaattagattgccagaaacattatctaatgagttacttcattatattgaaaacaaaagtctgtcaaatgaagatgtattatttcaatcattgagaactaatcaagtattatctaggcaacaagcctatcgtattattcatcaagcagcaattaaggctggcatagagaatgtaggactaacgacattgcgtaagacatttgcgtatcatgcatatcaaaagggcatacctattcctgtcattcaaaagtatttagggcatcaatcagctatagaaacattgaattttatcggtttagaaaatgaatgtgaacacagtatttatatttcattacaattataacgacaaaggaggctaataatgagtttggtttatctattaattgccatactagtaattatggcgatgatattattaacatctaaacgtagagcaatggctaaatatgcaggatacatagcgctgactgcacctgtaatagcatctatttattttttgttacaagttccatcagtaattaaacagcattatttgtctgtttccattccgtggatgacctcattagatattaatgtagatttacgtttagatggtttgagtttaatgttttcccttattatttcccttattggaatcgctgtattcttctatgcaacacaatatttatcctctcgtaaagataatttaccaaggttttacttatacttaacgctatttatgtttagcatgctcggtattgtattagctgataatacaatattaatgtatgtgttttgggaactaactagcgtatcatcatttctattaatttcatattggtataacaacggagatagtcaatttggtgcgatgcaatcatttatgattacagtatttggtggtttagcattattagttggttttatcatgttgtatatcatgacaggaacgaataacatcacagagatattaggacaagcagatcttattaagaaccatgctttatttatccctatgattatcatgtttttattaggtgcatttacaaagtctgcacaattcccatttcatatttggttaccaagggcaatggcagcgcctacacctgtaagtgcatatttacattcagccacgatggtaaaagctggtatctttttattacttcgatttacaccattattaggtcttagcaatatgtacatatatatcgtcacgtttgttggtttaataactatgttatttggctcaatcacagctttaaaacaatgggatttaaaaggaatcctagcatactctacaatcagtcaacttgggatgattatggctatggtgggtataggtggcggatatgctcaacaccaacaagacgcaatagcatctatttatgtatttgtgttatttgcagcattgttccatcttatgaatcatgctattttcaagtgtgcgcttttcatgggtgtagggattttagatcatgaagcaggttcaagggacatacgaattttaagtggcatgcgccaattatttccaaaaatgaatctagtcatgacgatagcggctctatctatggctggaataccatttttaaatggatttttaagtaaagaaatgttcctagatgcattaacacaaactggacaattatcccaatttagtttgatttcaatgatagctatcgtgtttgttggtgttattgcgagtgtttttacattcacatatgcactttacatggttaaagaagtattttggacaaaatatgattctaaggtttttactaaaaaaaatatccacgaaccatggttgtttagtttaccatctcttttattaatgggattgataccaatcatctttttcgtgccaaatatacttgggaaagggattattgttcctgcgttaagagctgtatcaggtggtaatcatcaaattgatcaattggcaccacatgtttcgcaatggcatggatttaacataccgcttcttttaaccatcatcattattttattgggtagtgtactagcaatcaaagtagattggaaaaaagtgttcacgggtaaaatcagacagatttcagtttcaaaagggtacgaaatggtttaccgacaatttgaaaagtttgctacgaagcgatttaaacgtgttatgcaagatcgtttaaaccaatacattattatgactttaggcatatttatgattatcattggatatggttatattcgaattggacttcctaaagtacatcagttacatgtttctgaatttggggcattagaaattatattagcaatcgtaactgtcacaattggtatttctttaatttttatacgtcaacgactgacaatggtcattttaaatggagtcatcggttttgttgtgactttattctttatagcaatgaaagcacctgatttagcattgacacaacttgtggttgaaaccattacgacgattttatttattgttagcttttcaagattacccaacgtaccaaggtctaaagttaataaaaaacgagaaataattaaaatttcagtatctcttatgatggcgctgattgttgtgtcacttattttcatcgcgcaacaagcagatggattggcattgatttctaatttttatcttagagcggataaattaacaggtggcaaaaacattgtgaatgcgattttaggagactttagagcattagatacattgtttgaaggtttagtattaattattactggattaggtatttacacattattaaattaccaagataggaggggacaagatgaaagagaatgatgtcgttttaagaacggtcacgaaactcgttgtatttattttattgactttcggattctacgtcttcttcgctggccacaataacccaggtggtggctttataggtggtttaatatttagttccgcgtttattttaatgtttctagcttttaatgttgaagaagtattagaaagcttaccgatagattttagaattttaatgattattggtgcattagtttcatcaattactgcgataatgccaacattttttggaaaaccttttttgtcgcaatatgaaacaacattgacactaccaattttagggcacattcacgtaacgacaataacactgtttgaattgggcattttgttctcggttgtcggggttattgtaacggtgatgctgtctcttagtggaggtcgatcatgaatttaattttattactagttataggatttttagtatttatagggacatatatgatattatctataaatttaattcgtattgtcataggtatttcaatttatacacatgctggtaaccttattatcatgagtatgggcacttacggctctaataaatcagaaccgctgattacaggtggaaatcaattgtttgtcgacccactgttgcaagctattgtattaactgcaatagttataggttttgggatgactgcgtttttacttgtcctcgtttatagaacttataaagtaactaaagaagacgaaattgaaggcttaaggggggaagatgatgctaagtaacttattgattttaccaatgttattaccattcctttgtgccttaatcctagtatttctaaaaaataatgaccgtatttctaaatatttatacttaggcacaatgactatcaccacaattatttcattaatgcttttaatttatgttcagcgtcatcgtccaattacattggattttggtggttggactgcaccatttggaatacagtttttaggagattcgttaagtttaatcatggttacaaccgcttcgtttgtgattactttaattatggcatatggatttgggcgtggcgaacataaagcaaatcgttatcatttaccttcatttatattatttttaagtgttggtgtgataggctcttttctaacatcagatttatttaatttatacgtcatgtttgaaattatgttactagcgtcatttgtactcattacacttggacaatctgtagaacaattacgtgctgcaattatttatgttgtcttgaatattattggttcatggctattcttattaggtataggtttactttataaaacagtaggtacattaaacttttcacatattgcaatgcgtttgaatgacatgggagataatcgcactgttacaatgatttcattaatcttcttagtcgcatttagtgcgaaagcagcgctggtcctttttatgtggctaccgaaagcctacgctgtgttaaatactgaacttgcggcattatttgcagcgttaatgaccaaagtgggcgcttatgcattgattcgcttctttacattattatttgaccaacataatgatcttatacatccattgctagcaacaatggcagctttaacaatggtcatcggcgctataggtgtcattgcttataaagatattaaaaagattgcagcttaccaagtcataatctcaataggatttatcattttaggtttaggaacaaacacgtttgcaggtattaatggtgcaatattttatttagtaaatgatattgttgtgaaaacatggctattctttattattggtagtttagtttatattactggttatcgacaatatcaatatttaaatggtttagcgaaaaaagaaccattctttggtgttgcatttattataatgatttttgctattgggggcgtaccaccatttagtggttttccaggaaaagtacttattttccaaggtgcattacaaaacggtaattatataggactcacgttaataatcattactagtttaattgctatgtacagcttgtttagaatacttttctatatgtattttggagataaagatggcgaagaagttcattttaagaaaatcccacaatatcgtaaaggtattttaagtattttagtagttgtggttatcgcaatcgggattgcagcgcctgtgctgttaaaaataactaatgatgcaacagagcttaatacgaacgatcaattatatcaaaagcttgttaatccacatttgaaaggagaggaataaatgaatcaaattgttttaaatattatcattgcattcttatgggttttatttcaagatgaagatcattttaaattctcgactttcttttctggatatctaattggtttaattgtcatttatatattacacaggtttttcagcgatgatttttatgttagaaaaatttgggtagctattaaatttttaggcgtttatttatatcaattaataacatctagcattagcacgattaattatattctttttaaaacaaaagatatgaaccctggattactttcatatgaaacaagactaacaagtgactgggcaataacatttttaacaattttaattattataactccagggtctacagtaatacgaatttctcaagactcaaaaaagttttttattcatagtatcgacgtgtctgaaaaagaaaaagatagtttgttaagaagtattaagcattatgaagacttaatattggaggtgtcgcgatgatacaaacaatcacacatattatgattattagttcactcattatttttggaattgcattaatcatctgtttatttagattaatcaagggacctacaacagcagatcgtgtcgttacatttgatacaacaagtgctgttgtcatgtctattgtgggtgtcttaagtgtactaatgggcaccgtttctttcttagattcaatcatgctcattgccattatatcttttgtaagttctgtatcgatttcaagatttattggtggggggtatgtgtttaatggaaataacaaaagaaatctttagtcttattgctgctgtgatgttgttgttaggtagttttattgctcttattagtgcaataggtatcgtgaaattccaagatgttttcttaagaagtcatgctgcgacaaaaagttcaactttatccgtgttattaactttaatcggtgtattaatttattttattgtgaatacaggatttttcagtgtgcgtttattactgtcacttgtttttattaatttaacttcacccgtcggcatgcacttagtcgctcgcgctgcttatcgcaacggcgcttatatgtatcgaaaaaatgatgatcacacacatgcatcaatattattaagttcaaatgaacaaaactctacagaagcattacaattacgtgctaaaaaacgagaagagcatcgtaagaaatggtatcaaaacgattgaagtgttggctaaattgttaagcataacaatgctgttgaagatttgttttcaaatttaatcattaaaagagtactttgaaattggttagtcgattttaaggtgctcattttttgtattataagttaatgttgttatgtgaaagcaagttgtttatttatacaaacaattagtgataaaataaaattaaataattgcaaatttaagtactgcaatcgtagacatatatctatattaaagtgcttttgtggtcgctaactcaatttatcctctaaagtataattacaacgagatgtgatacttaattttcaattaaacaatactttatagagaggtgaaagtttggaaatatttgaaacaattcttatatttatagctgttgtgatactaagttcgtttgtccatactttcatacccaaagtacccctagcatttatacaaattttcttgggcatgttactatttattaccccaatccctgttcaatttaattttgattctgaattgtttatggtaacaatgattgcgcctttgttatttgtagaaggtgttaatgtttctagagtccatttaaggaaatatattaagccagtgatgatgatggcattaggattagtcattactactgtgataggtgtaggtttatttattcattggatttggccagatttacctattggagcagcatttgcaattgctgccattctttgtcctactgatgcagtagcagtgcaagcaatcactaaaggaaaggtcttgccaaaaggagcaatgacaattcttgaaggtgagtcattattgaatgatgctgctggtattatttcatttaaaatagctgttggagtattagttacaggtgctttttcacttgttgatgctgttcagttgtttttaattgcatcaattggtggcgcagtggttggtttacttataggtatggcattagtaaggttccgattaacattgatgcgtcgaggatatgaaaacattaatatgtttacaattattcaattggtaacaccatttgttacgtatttaattgctgaattgtttcacgcatcaggaatcattgcagcagtagttgcaggacttgtacatggtttcgaacgtgacagaattatgcaagtacgtacacaactgcaaatgagttacaatcatacatggaatatactaggttatgttttaaatggctttgttttttcaatattaggatttttagtacctgaagttattattaaaattatcaaaacagaaccgcacaatttaatctttttaataggcatcactattgttgttgctttagctgtctatctatttagatttgtttgggtttatgtgttatatccttatttttatttagccatcagtccattccaaaaaatgatgactaaaaatgatgatgataatccaacgactgagaaaccaccaaagcgaagtttatacgctttaattatgacgttatgtggtgtgcatggaacaatttctttagcaatcgcattaacgttaccgtattttttagcagggcatcatgcttttacgtatagaaacgacttattatttattgcatctggtatggttattattagtttggtagttgcgcaagtattattgccattattaacgaaacctgcacctaaaacagtaattggcaatatgtcgtttaaagttgctagaatttatatattagaacaagttattgattatctaaatcaaaaatctactttcgaaacaagttttaaatatggtaatgtgattaaagaatatcatgataaattagcatttttaaaaactgtagagaaagatgatgaaaactctaaagaattagaacgtctacaaaaaatagcttttaatgtagaaacaaaaacattagagtctttagtagatgaaggacaaataacgaatagtgtacttgaaaactatatgcgttatgctgaaagaacacaagtatatagacaagcatcattaataagaagaatgattgtattattacgaggtgctttattaaaacgaagagtacaaacgagagtgaactcggcatcttcacttagtgttacggataacttaatggaattaaataaaattaataaattagtccattataatgtggttagtcgtttgtctaaggaaacaacaaaagataatacacttgaagttggaatggtttgtgacggttatttaatgcgaattgaaaacttaacaccgtctaatttcttcaattcagcaagtgaagatacgattactaaaattaaattaaatgcattgagagaacaacgtcgcattttacgtgagttgattgatacagatgaagtatcagaaggtacagcgttaaaactaagagaagcaatcaattatgatgaaatggttattgtagatagtatgacgtagttcgtaattatgctaaaagggattgatgaaaaactgaatggcttttcatcaatcccttttattttagagaaattgaatagatagttttaaactatacgaattattaacatttgagatttaattgaaataagttttaaaaattggaggagatagattaatcgaagtcatttaaagatgaagataagtgcattcacaaaaaatagccacactcatatgacatcggatgagtgtggcttaaggatctatggggggaggaaaccatagatatttactttgataggccagattaaatatcaaagtatgcgattatttatagcttgatgcaaaagtggtatgcctattaaaagttactgcacatagctttttatattccgttcaaaggaaaggggcatacaattgaacaatctgtaatagtacttttaaccagctatgctaaaagtctagtagggagaacagttgtccaatcacataagaacctctaacttcgttagtacgattaagaaaagctttttagttagtatgtaatacaatttattgacgcgcgtgaatctcttttataagagtgtgtagggaatggcgttgtataaattgtattagaagaacttctaacgcatctctgtggttaaaagagatgaagggaacgtcagtttaatcaaaaccacataaagcttttaactttgctctttgatttaaagagtgacaaatgtttatagtttaattaaaactgcataagaacttctagcttttctctttcgttcaaagagaagcggctgttcgcagtttaattaaaaccacataaagcttttaactttgctctttgattcaaagagtgataaatgtttatagtttaattaaaactgcataagaacttctagcttttctctttcgttcaaagagaagttctaataccaccatatcgtgcgatcgggaacggtatatatattaataggagggtaatatatatttaacgcacgatatgggactattagccttcgactttgttatgttgatgtgtggcctaaaatattggagataccaatattttaggttgcatcaacatcaattcatcttacttcattaaaacacagcgtgttatttcatgcttccgtgtacagtatcaatatttgatttcatcattttgtagtaagagtcacctttagtgccttctttaccgattgaatctgtgtacacttcaccaaagatatctttcttcgtttcttcagataaactttccattgctttcttatcaacacttgtttctactaataagtgttttaatttgtgttttttaacaaactcaatagcttgtctcatttgttctggtgtaccttgtttttcagtgttaatttcccaaatataacctggtgtaataccgtattgttttgagaagtatttgaaggcaccttcacttgtaatcatggcacgttgttcttttggaatgtcattaaatttgtctttactgtcattatttaatttttccaattgagcaatgtatttgttaccttgcttttcataatctgctttatgttttttgtcgttatcgataaatgtttgttgaattgtttttacgtatttaataccgttatctaaacttaaccatgcgtgtggatcttgtttatctttgttgccttcttcaccgtttaaatagataggtttaacatcttttgatactgcgataacttttttatcttttaatgatttaccagcctgttctaaggctttttcaaaccaaccgttaccagtctctaaatttaatccgttgtataaaataacgtcagcgtcagttaactttttaatatctttaggtttaacttcatattcatgaggatcttgaccaacaggtacaatactatgaatatcgacgttgtctccaccaacatttttagccatatcatataaaattgaattcgtcgttactacttttagtttgccatttgacttatcactgctttgtttaccaccagtaccacatgcagcaactaaaagtaataaggctaataataaaggtactaattttttcatgttaaacttcctcgtttctttctattcgtaaattttgtgaaaaataatgtgatgatataaattacaaacgtacaaagtacgattgttgcaccactaggaatgttgtaaatatagctgtaataaagtccgacaattgaacttatgacacttattaaacttgctataatcatcattgagtatagttttttactaattaaaaatgctgtagatgcaggtgtaattaataatgcaactacaagaataatacctaccgtttgaatacttgctactgttactaatgagagtaacaacatcacaaagtaatgtaataacgtcgtatttagaccactcattctactaaacgttggatcgaatgtagaaatcattaatggacgatagaaaataatgattagaataaggacgattgaaccaatcacaatagttgttaaaaatgcactatttgtgattgccagtaaattaccaaacagaatatggtacaaatctgtcgtagtgtttattaagctaataataataatccccgaagctaagaaagcggtaaaactaattccaatagcggcgtcaggtttcgttttactactagatgtgatataaccgataaaaatacttgcgatcataccagttataagtgcgcctataaacattggaataccaaataagaatgataaggcaacaccaggtaatactgcgtgactcattgcatctcccattaatgaaagaccacgtaatacaattaaactaccaactgtaccacaaactatccctacaataattgaagttatcaatgctcgattcaagaattgatatgtaaataaatgttcgacaaactctaacatgttatattgctcctttgactagggtcactacagtcagtgctactcataaatgtttcgtttaagcgagtgacactcatagcctcttcactatcaccaaagtatcgtaatgtttgatttaatagaataatgcgatcaaagtattgctttgcttttgatagatcatggtggatgataagaataagttttccttgttgttttaagttctcgatttttgtcatgattaatttttcgctactaaaatcaattccgacaaacggctcatctagaaaataaacttcactttcggacatcaatgctcttgctactagcacacgttgtaattgtccaccacttaattctgaaatttgtcgatgacgtaaagattctaattctaaatcgcttaataactgtttgagtttatcccttgctgatttattaggtcgtctaaaccatccaatttctttgtagcaacctgataaaatcacttgttccacacttataggaaaatctaaatcaatatgtgctttttgtggaatatatgtaatatgttgcagttgttgttgtataggtttgttatataacaatttagtaccggtagcattaaattcaccaattaaagacttgataagggaagatttaccagcaccattcgggcccatgataccaattatttcgccgcgtactggtatcgataaggaaatgtttttaagtacatgcttattacctaaaaacagatttaaatcttttgtttctaacaaacgtttatacctcctaattaaaagtttaggctaacctaattaattgtataataaactgagaatatttatcatgtcaagtaaattcgtgatataatatagacaatgtatgtgaggtgaaagtatgttaactgaagaaaaagaggactatttaaaggcaatccttacgaataatggcgataaaaattttgtgacaaataaaatcctatctcaatttttaaatattaagcctccatctgtaagtgaaatggtagggcgtcttgaaaaagcaggctatgttgaaacaaaaccgtacaaaggtgttagattaacagaggatggtttaacgcatacgcttgatatcattaagagacatcgactattagaattatttttaatagaaatattgaaatataattgggaagaagtacatcaagaagcagaaattttagaacatcgaatttcagatttatttgttgaaaggcttgatagcttgttaaatttcccagaaacttgcccgcacggcggtgtgattcctagaaataatgaatataaagagaaatatataacaacgatattgaattatgaacctggcgatatcgttacaatcaaacgtgtgagagataagactgatttgctaatatatttgtctagtaaagatatctctattggtaatgaagtagaaattgtatcgaaagataaaatgaataaagtaattattatcaaacgtaatgataatgtaattattgtcagttacgaaaatgcaatgaacatgtttgctgaaaaataaaataaagaagccataaagatatccatgattgtactgataaagacatatggatcattgctttaggcttcttttttattagttaatttatcaagtgagtatatttgagtaaaatattcactgcataaagattgaagataatccagattgtactataaatgaagataggtacatgactgagttctttaagtgcactaccatcccactgtggactcggacgctggaaagtcaatttagcaatcgtccaactagattgtagaacttcgcctaataatacacctaaaatatattgataactcattgtgacaagtagttgaatttctactatattttcatcttttaatataaaatacaacatgatagaaattaaagttataacaacaatgggtgagccttttctagatgttaaaattaaaaaataaataaatatcaataaataggtaaatataaagaaactaggtatctgataatggctcgacgctagaccaatcaataacataataggtggcataaaataaccaccaatcgttgtaagccattggcctgctagatgtctagattgtgtaattgcgaatccttgttgtaatgtctgttgtcgctctcgtgggcttgttacaatgactaaatcttttgcacggccaccagcgagtttattaaacagtacatgaccaaattcatgtgttaaaacagggatatagtttaaaatgacatctaaatagttcaaaacaggcttatgtctatattgatgaatagcaatataacaagctgcaacaataacgataacgtatatattaagttgaattgtcgtattaaaaaagttggataaataattcattgttaacctcatataagatattaatttaaagtttgcttatcacttattataaatgatattggcatcaatagcgttagactttagacttaccctagttaaactaattttaatttttgaaaaggtgaatatgtgttaaaataaagcaaaatcatttcgatataaataggatgaatataaatactgttaatattgattacactaacataataatgaaataagataggagattcctgttatgactgttgaagaaagatccaatacagccaaagttgacattttaggggtcgattttgataatacaacaatgttgcaaatggttgaaaatattaaaaccttttttgcaaatcaatcaacgaataatctttttatagtaacagccaaccctgaaatagtgaattacgcgacgacacatcaagcgtatttagagttaataaatcaagcgagctatattgttgctgatgggacaggagtagtcaaagcttcgcatcgtttaaagcaacctctagcgcatcgtatacctggtattgagttgatggatgaatgtttgaaaattgctcatgtaaatcatcaaaaagtatttttgctaggggcaactaatgaagttgtagaagcggcacaatatgcattgcaacaaagatatccaaacatatcgtttgcgcatcatcacggttatattgatttagaagatgagacggtagtgaaacgaattgaactgtttaaacctgattacatatttgtaggtatgggattccctaaacaagaagaatggattatgacacatgaaaaccaatttgaatctacagtgatgatgggcgtaggtggttctcttgaagtatttgcaggggctaaaaagagagcaccttatatctttagaaaattaaacattgaatggatatatagatcattaatagattggaaacgtattggtagattaaagagtattcctatatttatgtataaaatagccaaagcaaaaagaaaaataaaaaaggcgaaataatcatgatgacaaaaataaaaccgaggaaatccttaaatggagattctcggttttttagtttatttaataacgaagcgggactcatcgagtttgtttctaaattctttttgttcggctttggatttctttttaaaatcgtttaggaaagcttcatatttaggtaatacatcatcaagttcaccgtaatcttttaactttccaccttcaatccaagcaatcttagtacaaaattgtctcacttggcctaagttatgactaacgaaaaagatggttttgttttgctctttaaactcgtaaattttatctaaacatttttgtgcaaaagtttggtcacctacagataaagcttcgtcaatgactaagatatctggattaactgtgatattaattgaaaaaccaagttttgcacgcataccacttgaatactttttaactggttgatagataaactcaccaagttcactaaattcaataatcttaggtgtcatcgctttaatttcttttcgcttaaagcccatacataacattttaaattcgatattttcaatccctgtaagttgtccactcaagccagcactaattgcgataacgctgacttcaccattacgatccacttttccaacagtaggcgacaaagaaccgccaatgatattgctcaacgttgatttgccggaaccattaatgccaacaagtcctatgacgtcaccttcatatgcttttaaactaatgtcatctaaagcgaaaaatgttttgtttttatgtttgggaatgagcgcatctttcatacgttctttatttgtacgataaatacgatattcttttgttacatttttaatgtttaccgaaacgttcatttgtagaccttccttattcacatttatctagattataatatactactcaacagttgttaaattttaaaacctgttgtaaagtgtatagaagattttgttattatcagagttggtgttttgacacaaaatgttaatcatcaatgataacaatgatatttaaaaactaaacttatttcaacttacatgattgtatactataatgtatttgtaataaactaatattttaaagaactagacaataattttgatagcatccatgtatagtgatagtatttacaacaattattataatactatttagttaagtagagaaatagttaaacatttgaaagtgtggtttaatggaatgtcagcaataggaacagtttttaaagaacatgtaaagaacttttatttaattcaaagactggctcagtttcaagttaaaattatcaatcatagtaactatttaggtgtggcatgggaattaattaaccctgttatgcaaattatggtttactggatggtttttggattaggaataagaagtaatgcaccaattcatggtgtaccttttgtttattggttattggttggtatcagtatgtggttcttcatcaaccaaggtattttagaaggtactaaagcaattacacaaaagtttaatcaagtatcgaaaatgaacttcccgttatcgataataccgacatatattgtgacaagtagattttatggacatttaggcttacttttacttgtgataattgcatgtatgtttacgggtatttatccatcaatacatatcattcaattattgatatatgtaccgttttgttttttcttaactgcctcggtgacgttattaacatcaacactcggtgtgttagttagagatacacaaatgttaatgcaagcaatattaagaatattattttacttttcaccaattttgtggctaccaaagaaccatggtatcagtggtttaattcatgaaataatgaaatataatccagtttactttattgctgaatcataccgtgcagcaattttatatcacgaatggtatttcatggatcattggaaattaatgttatacaatttcggtattgttgccattttctttgcaattggtgcgtacttacacatgaaatatagagatcaatttgcagacttcttgtaatatatttatatgacgaaaccccgctaaccattaataaatggaagtggggttcatttttgtttataatttaagtaaataacatatattaagttggtgtattatgaacgttttaataaagaaattttatcatttggtagttcgaatactttctaaaatgattacgcctcaattgattgataaaccgcatatcgtatttatgatgacttttacagaagatattaagcctatcatcaaagcattaaataattcgtcgtatcagaaaactgttttaacaacaccaaaacaagcgccttatttatctgaacttagcgacgatgttgatgtgatagaaatgactaatcgaacattggtaaaacaaattaaggctttgaaaagcgcgcagatgattattatcgataattattacctattactaggtggatataataagacttctaatcaacacattgttcaaacgtggcatgcaagtggtgcattaaaaaactttggcttaacagatcatcaagtcgatgtgtctgacaaggcaatggttcagcagtaccgtaaagtttatcaagcgacggatttttacttagtgggttgtgaacaaatggctcaatgttttaaacagtctttaggtgcaacagaagagcaaatgttgtattttgggcttccgagaattaataaatattacacagctgatagagcaacggttaaggcagagttaaaggataaatatggcattacaaataagttggcattatatgtaccaacatatagagaagataaagcagataatagggctattgataaagcttattttgaaaaatgtttaccaggatatacactgattaataaactacatccatcaattgaacattcagacattgatgatgtatcttcaatcgacacgtctacattaatgctaatgtcagatataattattagcgactatagttcgctgccaatagaagctagcttgttagatatcccaactatattttatgtgtatgatgaaggaacatatgataaggtgagaggcctgaatcaattttacaaagcaataccggatagctacaaagtgtatactgaagaggatttaataatgacgatacaagaaaaagaacatctattaagtccattatttaaagattggcataagtataatactgataaaagtttacatcagctcacagaatatatagataagatggtgacaaaatgaggcttacgataatcatacctacatgtaataatgaggcaacaattcgacaattgttaatatctattgagagtaaagaacactatagaatcctttgtattgatggtggttctactgatcaaacaatttctatgattgaaaggttacaaagagaactcaagcatatttcattaatacaattacaaaatgcttcgatagctacgtgtattaataaaggtttgatggaaatcaaaatgacagatccacatgatagtgacgcatttatggtcataaatccaacatcaatcgtattgccaggtaaattagataggctaactgcagcattcaaaaataatgataatattgatatggtaatagggcagcgagcttacaattaccatggtgaatggaaattgaaaagttctgatgagtttattaaagacaatcgaatcgttacattaacggaacaaccagatttgttatcaatgatgtcttttgacggaaagttattcagtgctaaatttgctgaattacagtgtgacgaaactttagctaacacttataatcacgaaatacttgtcaaagcgatgcaaaaagctacggatatacatttagtttcacagatgattgtcggagataacgatatagatatacatgctacaagtaacaatgaggattttaatagatatatcacagaaattatgaaaataagacaacgagtcatggaaatgttactattacctgaacaaaggctattatatagtgatatggctgatcgtattttattcaataattcattaaaatattatatgaatgaacacccagcagtaacgcacacgacaattcaactcgtaaaagactatattatgtctatgcagcattctgattatgtatcacaaaatatgtttgacattataaatacagttgaatttattggtgagaattgggatagagaaatatacgaattgtggcgacaaacattaattcaagtgggcattaataggccgacttataaaagattcttgatacaacttaaagggagaaagtttgcacatcgaacaaaatcaatgttaaaacgttaacgtgtacattgatgaccataaactgcattcctatgatgtgacaatatgaggaggataacttaatgaaacgtgtaataacatatggcacatatgacttacttcactatggtcatatcgaattgcttcgtcgtgcaagagagatgggcgattatttaatagtagcattatcaacagatgaatttaatcaaattaaacataaaaaatcttattatgattatgaacaacgaaaaatgatgcttgaatcaatacgctatgtcgatttagtcattccagaaaagggctggggacaaaaagaagacgatgtcgaaaaatttgatgtagatgtttttgttatgggacatgactgggaaggtgaattcgacttcttaaaggataaatgtgaagtcatttatttaaaacgtacagaaggcatttcgacgactaaaatcaaacaagaattatatggtaaagatgctaaataaattatatagaactatcgatactaaacgataaattaacttaggttattataaaataaatataaaacggacaagtttcgcagctttataatgtgcaacttgtccgtttttagtatattttattttatttttctaaataaacgattgattatcatatgaacaattagtgctaatccagcgactaggcatgcaccaccaatgatagtgaataatggatgttctgcccacatacttttagcaacagtatttgccttttgaataattggctgatgaaattctacagttggaggtccataatctttattaataaattctcttggatagtccgcgtgtactttaccatcttcgactacaagtttataatcttttttactaaaatcacttggtaaaacatcgtagagatcattttcaacataatatttcttaccatttatcctttgctcacctttagacaatatttttacatatttatactgatcaaatgaacgttccattaatgcattccccatcatattacgttgcttctcgccaccaaggtttttatagtctcctgcacccatgataacttgattaattctaaatttacctcgtttagtagtaatcgtatggttgtaatttgctgtatcacttgatccagtttttaaaccatctgtaccaggcaaactcatttttgcaccttccaatgaaaagttgaatgtgtaatacgtaactgcatgcgttgttggtgctaactgctttgtaaagtctaatattttaggtgtctctttaatcacgtgtaaatctaaaatggcaaagtctctagcggtcgttacagtacgttcttggtctttatactttgttggtgcaaatgtacgtaatcttgaattttcagcacccgttggattgacgaaatgtgtatttttcattccgatagctttagctttgttattcattaaatcaacgaaatcgctggtgttttttgataccttcttagctaaaattaatgccgcggcattactagaattagatactgtaatttgtaataggtctgcgattgtccatacttgtccaggatatagtttcgtattactcaactcaggtagtgtagacataatatattctttgttcgtcattgtgactgtgtcatcaagtgaaagctgccccttatttacagcttccaatgttaagtacattgtcattaatttagtcatagacgctggattccacttagtatcgatattgtattgatacagtaattgtccagtttgactaacattaacagcactcgtcggttcgtatgcagccgacaaacctgcataaccatattgatttgctgcttgtacaggggttacgtcactgttagcagcttgtgcatatggtgtcataatacttaatgttaaacataaaatgatgataatagatattaaatttttcataaagcgttaatcttcccttttccaattcttaaatattccctaaaagcaatggtcattcctaattacggaaatcattgctaattcacttcaccttaattaaattgttgaaaataaagttttctgcagttaatttgaaaaataatgcaaatatattacgtgcgtagctaaaggtgttataatgtttgtacgaagagcaaacttactcaaaagcgattaattttcatgttttaatataaagactttgagaagttattacaaaaaatgcaatagaaatattctatcatataaatgttatgagcggtattttggggcaatactttatttgatttttaaagttttgttgggagaaagtatatgatagaaatgcatgtatctatctaaatgaattaactataaatttcaaacagaagaggtaaaactatgaaacgagaaaatccattgtttttcttatttaaaaaactatcatggccagtgggtcttatcgttgcagctatcactatttcatcactagggagcttaagtggactattagtgccactgtttactggacgaattgtagataaattttccgtgagccatatcaattggaatctaatcgcattatttggtggtatttttgtcatcaatgctttattaagcggattaggtttatatttattaagtaaaattggtgaaaaaattatttatgcgatacgctcagttttatgggagcatatcatacaattaaaaatgccattctttgataaaaatgaaagtggtcaattaatgagtcgattaactgacgatacgaaagtgataaatgaatttatttcacaaaagctacctaacttattaccatcaatcgttacattagttgggtcactaatcatgttatttattttagattggaaaatgacattattaacatttataacgataccgatatttgttttaattatgattcctctaggacgtattatgcaaaagatatcgacaagtacacaatctgaaattgcaaactttagtggtttgttagggcgtgtcctaactgaaatgcgtcttgttaaaatatcaaatacagagcgacttgaattagataatgcacataaaaatttgaatgaaatatataaattaggtttaaaacaggctaaaattgcggcagttgtacaaccaatttcaggtattgttatgttgctaacaattgcaattattttaggttttggtgcattagaaattgcgactggtgcaatcactgcaggtacattaattgcaatgatattttatgttattcaattatcgatgcctttaatcaatctttcaacgttagttacagattataaaaaggcagtcggtgcaagtagtagaatatacgaaatcatgcaagaacctattgaaccgacagaagctcttgaatattctgaaaatgtattaattgatgacggtgtgttgtcatttgaacatgtagactttaaatatgatgtgaagaaaatattagatgatgtgtcgttccaaatcccacaaggtcaagtgagtgcttttgtaggtccttctggatctggtaaaagtacgatatttaatctgatagaacgtatgtatgaaattgagtcaggtgatattaaatatggccttgaaagtgtctatgatatcccgttatctaagtggcgacgcaaaattggatatgttatgcaatcaaattcgatgatgagtggtacaattagagacaatattttatacggaattaatcgtcatgtttcagatgaagaacttattaattatgctaaattagcgaactgtcatgattttatcatgcaatttgatgaagggtatgacacgcttgtaggtgaacgaggattgaaactgtctggcggtcaacgtcaacgtattgatattgctagaagttttgttaaaaatcctgatattttgttacttgatgaagcaacagctaatctcgatagtgaaagtgaattgaaaattcaagaagctttagaaacattgatggaaggtagaacaacgattgtcattgcgcatcgtttgtctacaattaaaaaagccggtcaaattatattcttagacaaaggacaggtaacaggtaaaggtacgcattcagaactgatggcatcacatgcgaagtataaaaactttgtagtgtctcaaaaattaacagattaattttatatatataagtaagcttggagcaaatacagatataccatcgagaaaatttaagtgtggcacattgatggatatagatgttaataaaatgcttcaagcttttgtctattttaaatcatgtgagaagttacgacataataattcttaaattaatgaaatcgatattttaagaaaaaaatgctcatggtataatacaagttataagcaaacatacatatattaaatactgtagccacgagtcataattcttcatattttacatagcaatttaactgattttagagtccacggtacagaagtttgatatttcaatgtttctaaatttttaaaaaattaaatcataggtgggtgccaaatgtttttattaatcaacattattggtctaattgtatttcttggtattgcggtattattttcaagagatcgcaaaaatatccaatggcaatcaattgggatcttagttgttttaaacctgtttttagcatggttctttatttattttgattggggtcaaaaagcagtaagaggagcagccaatggtatcgcttgggtagttcagtcagcgcatgctggtacaggttttgcatttgcaagtttgacaaatgttaaaatgatggatatggctgttgcagccttattcccaattttattaatagtgccattatttgatatcttaatgtactttaatattttaccgaaaattattggaggtattggttggttactagctaaagtaacaagacaacctaaattcgagtcattctttgggatagaaatgatgtttttaggaaatactgaagcattagccgtatcaagtgagcaactaaaacgtatgaatgaaatgcgtgtattaacaatcgcaatgatgtcaatgagctctgtatcgggagctattgtaggtgcgtatgtacaaatggtaccaggagaactggtactaacggcaattccactaaatatcgttaacgcgattattgtgtcatgcttgttgaatccagtaagtgttgaagagaaagaagatattatttacagtcttaaaaacaatgaagttgaacgtcaaccattcttctcattccttggagattctgtattagcagcaggtaaattagtattaatcatcatcgcatttgttattagttttgtagcattagctgatctatttgatcgttttatcaatttgattacaggattgataacaggatggatgggcataaaaggtagtttcggtttaaaccaaattttaggtgtgtttatgtatccgtttgcgctattactcggtttaccttatgatgaagcgtggttggtagcacaacaaatggctaagaaaattgttacaaacgaatttgttgttatgggtgaaatttctaaagatatcgcatcttatacaccacaccatcgtgcggttattacaacattcttaatttcatttgcaaacttctcaacgattggtatgattatcggtacattgaaaggaattgttgataaaaagacatcagactttgtatctaaatatgtgcctatgatgctattatcaggtatcctagtttcattattaacagcagctttcgttggtttatttgcatggtaatatgtcgaagagtgactacgataatacattttaactaaaaaagatgtccaggcatgtcgtctattgatataggtgagatgcttggacttttttattattgatataaagatatttaaatatttttaaagttaccgaaattgatgcaatataaaaaccaagtgcacatggtaatacacttggcttttatgggaaatgaatattattgtacatatgacagtaaggactaggtacagtcatagtacttcgagcaaaatttgttttgttattataaacaacacaaaggagataacttctctattgaagaagttaaaaacattatagcagacaatgaaatgaaagtaaattaaaaattcagaatatttttaattattatattgtgagtgatatttattagggaaagctattcttcatataaattagttaaatagtaaatctttgttaggactatttccatagagttgtgacagtatttttgttgtgctactatttttatagtctaataaatatataaaggggatggtttcgtgaataaaacggttaaagatttaatactagttgtcttaggttcatttatctttgctgcaggtgtaaatgcatttattatttctggtaacttaggtgaaggcggggttacaggtttagcaattattttatattatgcgtttcatatttcaccagccatcactaacttcttggtcaacgcagtattgattgtcataggttataaatttttgagtaagagaagtatgtacttaactattcttgtaacaattcttatttcaatatttttgagtttaacagaatcatggcaagtagaaactggaaacagcattgtgaatgccatttttggtggtgtaagcgttggactaggaatcggagtaattattcttgcaggcggtacaacagcaggtacaacaattttagcgagaattgcaacgaaatacctcgatgtaagcacgccatatgctttgcttttcttcgatatgatcgttgttgcaatttcacttacagttattccacttgataaagttttagtaacagtaatatcactttatataggaacaaaagtgatggaatatgtcatagaaggtttaaacactaaaaaagctatgacgattatctcaactaatcccgacaaacttgccaaagcaatagacgagcaaattggaagaggtttaaccattttaaacggacatggctattatacacgtgaagaaaaagatgtcttatacgttgttatttctaaaacacaagtttcaaaagcaaagcgattaattaaacaaatcgataaagatgcattcctcgtaattcatgatgtaagagatgtctatggtaatggttttcttgcagatgaataaataaatggtaagagcacacacatacttaaatagaagtccacggacaagtttttgaattatgaagacttatctgtggacgttttttattttataaaagtaatatacaagacatgacaaatcgaactatccaatttaaaaagtaatgttagtcaataagattgaaaaatgttataatgatgttcatgataatcattatcaattgggatgcctttgaaaattgataatttaaaaatagaaattattttttataaacagaaagaattttattgaaagtagggaaattatgaatcgtttgcatggacaacaagttaaaattggttacggggataacacgattataaataaattagatgttgaaataccagatggcaaagtgacgtcaatcattggtcctaacggctgcgggaaatctactttgctaaaggcattgtcacgtttattggcagttaaagaaggcgaagtatttttagatggtgaaaatattcatacacaatctacaaaagagattgcaaaaaaaatagctattttacctcaatcacctgaagtagcagatggcttaactgttggagaattagtttcatatggtcgttttccacatcaaaaaggatttggtagattaactgctgaggataagaaagaaattgattgggcaatggaagttacaggaactgatacattccgacaccgttcaatcaatgatttaagtggtggtcaaagacaacgtgtttggattgcaatggcattagcacaaagaactgatattatctttttagacgaaccaaccacatatttagatatctgtcatcaattagaaatactagaattagttcagaagctaaatcaggaacaaggttgtacaattgtcatggttcttcatgatatcaaccaagcgattcgtttctcagatcatcttattgcgatgaaagaaggcgatatcatcgctacaggttcaacagaagacgtattaacacaggaaatattagaaaaagtttttaatattgatgttgttttaagtaaagatcctaaaactggaaaacctttactggtaacttatgacttatgtcgcagggcttattcttaattaagtaagttaatatgataaaaaggacaattaacatgacaaatagagagaatccaacgccattgaagtttttatcctatattataggtttaagtatgatactactaatcacactatttatttctacattaataggtgacgccaaaattcaagcctctacaattatagaggctatttttaattataatcctagcaatcaacagcaaaacatcatcaatgagattaggattccgagaaatatagcagcagtaattgtgggtatggcgcttgcagtttctggtgcgattatacaaggtgtcactcgtaatggtcttgctgatccggcgctcataggtttaaattcaggtgcttcatttgctttagcattaacatatgcagttttaccaaacacttcatttttaatattgatgtttgctggatttttaggtgctattctaggaggtgctattgtattaatgataggccgatctaggcgtgatggatttaatccgatgcgtattattttagcgggtgcagcagtaagtgctatgttaacagcgctaagtcaaggtattgcattagcttttagactaaatcaaacagtaacattttggactgctggaggcgtttcaggcacaacctggtcacaccttaagtgggcaattccattaattggtattgcgttattcattatattaacaattagtaaacaacttaccattttaaatcttggtgaatcattagctaaaggtttaggtcaaaatgtaacaatgatcagaggcatatgtttaattattgctatgattctagcaggtatagcagttgctatcgctggacaagttgcatttgtaggtttgatggtacctcatatagcaagatttttaattggaactgattatgctaaaattctaccattaacagccttgttaggtgggatactcgtgcttgttgccgatgtgatagcacgatatttaggagaagcgcctgttggcgcaatcatttcatttatcggtgttccttactttttatatttagttaaaaaaggaggacgctcaatatgattagttcaaataataaacgcagacaattgatagcactggctgtttttagcattctactatttctaggttgtacttggagtattacctcaggtgaatacaacatacctgtagaaagatttttcaaaactttaattggacaaggtgatgccattgatgagttaatcttattagatttcaggttacctcggatgatgattactattttggctggcgcagcgcttagtattagtggtgcaatagtgcaaagtgtcacgaaaaatccaatagctgaaccaggtatattaggtattaacgcaggcggcggatttgcaatcgcattatttatttcagttggtaaaattaatgctgacaactttgtttatgtactgccgttaataagtatactaggtggtatcaccgctgcattgattatttttattttcagttttaataaaaatgaaggtgttacacctgcgagtatggtattaataggtgtaggtttacaaacagcattatatggtggctcaattacaattatgtcaaaatttgatgataagcaatctgatttcatcgctgcttggtttgcaggtaatatttggggtgacgaatggccatttgtcattgcatttttaccgtgggtgttgattattattccttacttactatttaaatcgaatacactaaatattattcatacgggtgataatattgcacgaggtctaggtgtaaggttaagcagagaacgtttaatattattctttatcgcagtgatgttatcatctgctgctgtagcagtagcaggttcaatttcgtttatcggattaatgggcccgcatattgccaaacgtatcgttggaccacgtcaccagttgtttttaccaattgccattttagtaggggcatgtttacttgttatagctgatacaattggcaaaattgtattgcaaccgggtggtgttccagcaggtattgtcgtagcaattattggtgcaccgtatttcttatatttaatgtacaaaacgaaaaacgtatagcgtcaaaggacacaacttattgctatgaaaagcactttattataaggcttttcatagcattttttatttaatgagtcactcaagactatttacattttcaataatgaaccattaagttatcaagactgtcttatcataaatatatttgataacggtatcaggttaaccctttatgatagcgcattcatttattctgttttatactatgactgataataccaaggaggtacaacatgatgaaaaagttaatcaataaaaaagaaacatttttaactgatatgcttgatggattgttaattgcgcacccagagttagatctgattgctaatacagttattgtaaaaaaagataagaaagaacatggtgtagcaatagtctctggaggtggaagcggacatgaacctgcgcatcccggttttgttgcagaaggtatgctagatgcagcggtttgtggcgaggtatttacttcacctacaccagataaaatattagaagctattaaagcagtagatactggtgatggtgtattactagttgtgaaaaactatgcaggtgacgtgatgaattttgaaatggcacaagagcttgcagaaatggaaggtataaatgttgaaacagttattgttcgtgacgacattgctgtgacaaatgaagcacaacgtcgtggtgttgcaggaacggtgtttgttcataagcttgccggttatcttgctgaaaaaggttattcattaacagagattaaatcgcgtgtagaagcgttgttacctgaaattaaaagtattggtatggcaattgagccaccgcttgttccaactactggaaaatatggctttgatattgaagacgacaaaatggaaatcggtattggtatacatggtgaaaaaggtattcatagagaagaagtaaaggatattgatcatatagttggaacattgttagacgaattgtataaagaagttactgccaatgatgtcatattaatggtaaatggtatgggtggtacgccgttatctgaattaaatatcgtaactaaatatattcaacaaaatttggctgcaagagcggttaatgttgctaaatggtttgttggtgattatatgacatctttagacatgcaaggtttttctataactatcgtgcctaataaaccagaatatctggaagcatttttagcaccaacaacaagtcaatactttaaataagcagtgaatatgaataaatatacatttatgaggtggcacaaatgaaagtgaatgatatgaaagcacgtttattaaatttagaagaaacgtttaaaaaacatgaatctgaattaactgaattagatcgagctattggtgatggtgaccacggggttaacatggttcgtgggtttagtagtcttaaagacaaacttgatgatagctcaatgcaatcattgttcaaatcgactggtatggcattgatgtcaaatgttggcggtgcatcaggaccactgtatggctttagctttgttaaaatgtctgcagttactaaagatgatatggataatcaagatttcattacactaattcaagcatttgccgaagcggttgaatcacgtgggaaagttactttaaatgaaaagacaatgtatgatgtagtagcacgagcagcagagaagcttaaaaatggtgaaactttaacatttaatgatttacagcaattagcagataatacaaaagatatggtagcaacgaaaggtagagctgcatattttggagaagaatcaaaaggttatatagatccaggtgctcaaagtatggtttatattttaaacgctttgattggagatgaagataatgcctaaaattatacttgttagccacagtaaagaaattgcaagtggtacaaaatctttgttaaagcaaatggctggtgacgttgatattataccaatcgggggattaccagatggttcaattggaacttcatttgatatcatccaagaagttttgactaaattagaggatgatgcattgtgtttttacgatattggatcttcagaaatgaatgtagatatggcaattgaaatgtatgaaggtaatcatcgtgtgttaaaagttgatgcaccaattgttgaaggcagttttatcgcagcagtaaagctgtcaatcggcggttcaattgatgatgcattagcagaaatcaaacaatcattttagttaaaatttactaataatgaaaaatgtaaacctttttcaaatgaaactttataaaaaatatgatagtatatatgtaaatgtttaataaaatctggagaaataggaggacattgccatgcaacaccttataaaaaaacatgtattgaatggcgagtttgatttagtacgacaattgatgtccgaaacagattttatggaatttgaagaagcatatatttcaagtgcgcatgaagtagaaagtatgatgttttatacatgtattttagatatgattaagtacgaagaatcatctgaaatgcatgacttagcatttttattgcttgtgtatccactaagtgaatatgaaggtgctttggattctgcttattatcatgcagacgcttccataaaacttactgacggcaaagaagttaaaagtttgttacaaatgttattattgcatgcgataccaacacctgttatttcagataagaaggcttttgatatcgccaagcaaattttaaaattagatcctaataataatgttgctcgtaacgtcttaaaagacactgccaaacgtatggacaacgttgttgttgatataaatgaattacaccaacgtaatgcacgttaatttcatttcaattatattagcttaataatagttttaacatttggttgggttgggacatatgttccagccttttttaatacttaaaaactatcgaagtaaacttgtatgcacaaatggtttttatacaagattttataaatttatacattttaatttagaacatgcgatagatggtttaaaccttgttaactgagagattttgatatgtattcttcgaaattcaactaaatatacgaaattcaagaagcacaataattaatcatttttcctatataaaagttcgtatgactgcattataaaagcatgaatttataatttttttaaatgtcattgaacgtgataatgtgaatggattgagcaattttgaaaaagtgaaaaataacctatgcgacttgcaattaattttcagtacgttataatgcacactgtgcaaaattaaggaggtctattattcacatgatgatgaataaagaagcaacaaaaattggatttgcctacgtcggcattgtagtgggcgcaggattttcaacaggacaagaagttatgcaatttttcactaaatatggcttgtgggcttatttaggtgtgattatatctggttttattttagcttttattgggcgccaagtagcaaaaattggtactgcctttgaagcgacaaaccatgaatcaacattacaatacgtattcggtgaaaagtttagtaaagtctttgattatattttaatcttcttcttatttggtatagctgtaaccatgatagctggtgcaggcgcaacatttgaagaaagttataacatacctacatggctaggtgcattaattatgacattagcaatttatgtaacattgctattagactttaataaaatagtacgtgcccttggtgtcgttacaccatttttaattgttttagttgtattaatcgctggcgtttatttatttaaaggtcatgtttcattagcagaagttaaccaagtagtgcctgaagcaagtatctggaagggaatctggtttggtacaatatatggtggattagctttttctgtaggttttagtaccatcgtagcaatcggtggggatactgaaaaacgtacagtgtcaggtgcaggcgcgatgtatggtggtattatctatactgtattactagcattgatcaactttgctttacaaagtgaatatcctacaattaaaaatgcatcaattccaacattaacattagccaataatattcatccgttaatagcaaccgtgttatctgttattatgctggcggttatgtataatactattctaggactaatgtattcatttgcagcacgttttacagaaccatacagtaaaaattatcatatctttattattataatgatggtggcaggttatttattaagtttcgtaggatttgctgaattaattaataagttatatacaattatgggatatgtaggcttatttattgtagtagctgtaattattaaatatttcaaacgtaaaaatgcggataaaaaacatattgcttaatatcatatgatggatatccgaaactttacaattgaatcactttgttttaatcttaaaagcaattcgtctctactcttatcgggcgaattgctttttatatttattcagtctattaatatgagcgtctaacaaatagagaggtacgatgtaatgaataaagataataaatggacgatgataactgcgttttttatagctgtaatcagtgtattgttagcatttcatctgaaacaacattatgaccaaattacaaatgagaaacatgctaataaagacaaaattaatataaaaaataaaaatgtgcgcatttatcaaaaccttacatacaatagagttttccctaacagtaaattagatattattacacctgttgatatgtcttctaatgccaaactgccagttattttttggatgcacggtggtggttatattgcgggtgataagcagtataaaaacccattattggcgaaaattgctgaacaagggtacattgttgtgaatgtaaattatgcattggcgccacaatataaatatcccacaccattaattcaaatgaatcaagcgactcaattcattaaagaaaataaaatgaatttacctattgattttaatcaagtaattattggcggtgattctgcaggtgctcaattagcaagccaatttactgcaatacagacaaacaatctattaagagaagccatgaaatttgatcagtcattcaaaccatcgcaaattaaaggtgctatactatttggtggtttttataatatgcaaacagttagagaaactgagtttccaagaatacagttatttatgaaaagttatactggcgaagaagattgggaaaagagctttaaaaatatttcacaaatgtcgacagtaaaacaatcgacaaaaaattatccaccaacatttttatctgttggagatagtgatccattcgaaagtcaaaatatagaattcagtaagaaattacaagaattgaatgtaccagtagatactttgttttatgatggtacgcatcatttgcatcatcagtatcaatttcaccttaataaacctgaatcgatagataatatcaaaaaagtgttacttttcttaagtcgtaatacatcttctagtggtattcaaactgaagagaaaccacaaatagaaaatccgagtaatgaattaccgttaaatccattaaactaatgataaacagtagtaatttattacttaagcaacatttaagatcttcaaattgaaaacgaataatttaaaacatgtggggctaatgtgtaagtatctgagatataataaatagttagcagtcctttatcatttctgtcccactctattataatgtgacatttattttgcttaccaatttgttttggaactgaaaataactttttacaactaaatagtcgaaaaactgtgtgtacatgatataataaatttataaattgtaaagaattcaaaagaaaaattaaaatatagattgagcacgaagtgatttgaaataaggttgtgaaagggaatgacaaggtctgcattaaaaccatttaaaaataaacgcgttatggttactggacgtatacaacgtgttttgtttaaaaattatttagatagacatagcacatttaagccgaatgtaaggatattattaaaagatgtatttgtttcaggtgtatcaatagatcatttatggttatatgagacaaataaatactatgcattggcaatggaacttattcatcaacgagtaaaatttagtgcgaatgttgtaccgtattacaaaataaatagaaataataatttattcgtacaagattatggaattaagcgtaaaggtaggttaattactgaagaagcttataatcaaaacaatcagtatcaggataaaatatatgaaaaattaccggatatagattttagactcgaagatttttatagtaaggaaaactaaaaaacatatatataaagcaccactaatcgtagttgatagttaatcaattacacattagtggtgttttattttgaatttaaatttgataaatgaataagagtatacgcattcatttaagattagatgacattgataagtatgagtaatgtattaggtaaccattaaattcgttgttatacgattctaatacaagattatgataaaatagctttaattaagaattttagccatcatatagtcatcataatatttaccatcgataaataacttatcttttaaaacgccttcgatttgaaaatcggcacttttaaaaagctcgagggcaggttggttattgagtggtacatttgcttcaattcggtgtatttgattgtttaaacaccaagccataatggcatcaagaagtgcttggccaattccacgatgttgatataatttctttacacctaaatcaattttagcaacatgtttaatgcgttgaaatggtgtcgtattaacaaaggcaaagccaacgagttgttcatcactttcagcaacaaagatgactttatgtggagaagtgatatattcttctaattgtttactagccgatgtgacgctaggatcatattctcctggtgtgtagaacatatacggagattcgtcgtatattttcgctaacattgaaatgaaattttctacatctttgatactaactctacgtataatatgggccataaaaagcctccagtattttgaaattttaaaacatttgctactattataatatatatttaaccaaaaggtagagtaatatgttttttggttacagtttaaaggagtattttagatgaaacctaaagttttattagcaggtggaacagggtatattggtaagtatttaagtgaagtgattgaaaatgatgctgaactttttgctatatcaaaatatccagacaataaaaaaacagatgatgttgaaatgacttggattcagtgtgatatatttcattacgaacaggttgttgccgcaatgaatcaaatagatattgctgtattctttatcgatccaacaaagaattctgccaaaataacacaatcatcagcaagagatttaacattaatcgcagcagataattttggtcgagcagcggctatcaatcaagtaaaaaaagtaatctacatacctgggagtcgttatgataatgaaacaattgaacgcctaggtgcatatggtacaactgtagaaacaacaaatttagtttttaaacgttctttagttaatgtagaattacaagtttcaaagtatgatgatgttagatcaacgatgaaggtagttttaccaaagggatggacattaaagaacgttgtaaaccattttattgcatggatgggttacactaaaggaacttttgtgaaaacagaaaaatcacatgatcaatttaagatatatattaagaataaggtgcgaccactcgcagtatttaaaatagtagaaacagctgatggaataataactttaatattattgagtggaagtttagtgaaaaaatatacagttaatcaagggaagttagaatttagattaatcaaagagtcggcagtcgtttatatacatctatacgattatatccctcgattattttggccgatttattactttatacaagcaccaatgcaaaaaatgatgattcatggctttgaagttgactgccggattaaagattttcaaagtcgattaaaatcaggagaaaatatgaaatatactaaatgatattgggtgatatggatgcaaatactactagtagaagatgacaatactttgtttcaagaattgaaaaaagaattagaacaatgggattttaatgttgctggtattgaagatttcggcaaagtaatggatacatttgaaagttttaatcctgaaattgttatattggatgttcaattacctaaatatgatgggttttattggtgcagaaaaatgagagaagtttccaacgtaccaatattatttttatcatctcgtgataatccaatggatcaagtgatgagtatggaacttggcgcagatgattatatgcaaaagcctttttatacaaatgtattaattgctaaattacaagcgatttatcgccgagtgtatgaatttactgctgaagaaaaacgtacattgacttggcaagatgctgtcgttgatctatcaaaagatagtatacaaaaaggtgatcagacgatttttctatccaaaacagaaatgattatattagaaattcttattactaaaaaaaatcaaatcgtttctagagatacaattattactgcgctatgggatgatgaagcatttgtcagtgataacacattaacagttaatgtgaaccgattacgtaagaaactatctgaaatagggatggacagcgcagttgaaacaaaagtaggaaaaggatatatggcacatgaataatttgaaatgggtagtttattttctgaaatcaagaaagaattggatattttggatactgtttttaaatattcttatgttaggcattagtcttattgactatgactttccaatcgatagtttgttttatattgtttctttaaatttaagcttaacactgatttttcttatattgactttttttaaagaagtaaaattatatagacattttgaaaaagataaagaaatcgaagaaattaagcataaagatttagcggaaacgccatttcaacgtcatacagttgattatttatatcgtcaaattttagcgcataaagataaagtggtcgaccaacagttgcaattaaacatgcatgaacaaaccatcacagaatttgtgcacgacatcaaaacaccagtgactgctatgaaattgttaattgaccaagaagagaatcaagaaagaaaacaagcgctattatttgaatggtcacgtattaactcaatgttagatacgcaattgtatattacgagattagagtcgcaacgtaaagatatgttttttgattatgtctcgttgaagcgcatggttattgatgaaattcaattaacaaggcatataagtcaagttaaaggtatcggattcgatattgattttaaagtggataatcatgtgtacacggatataaaatggtgtcgtatgattattagacagattttatcaaatgctttgaaatatagtgagaattataatgttgatatttcaacggaattaattgatcaacatgttgcgttaatcatcaaggatcacggaagaggtattagtaaaaaagatatgcctcgaatatttgaacgtgggtttacgtcaacggctaacagaaatgaaacgacatcatccggcatgggtctatacttagtggatagtgtgaaagatcaattaggaatacaattacaagtcacttcgactattggaaaaggaacaacggttaaattgatcttcccattacaaaatgaaattgttgagcgcatgtcagaagtgacaaatctgtcattttaaacatgcgttttgttacttagaattgatacatcatgaccacttcaacgatataatcaaatagatgttaattaaatacaaaattgaaggtaagcgtgccaaattgaatataaaggaaatgaagttaagataaatataggagtgttaaagtgacaatattagaagtaaaacaattaacaaaaatatatggcaataagaaaatggcacaagaagttctgcgagatatcaatatgtctgttgaagaaggtgaatttattgccattatgggaccttcaggatctggtaaaacgaccttattaaatgttttgagttcaattgattatatttcgcaaggttctatcacactaaaaggacacaaacttgaaaagctatcaaacaaagcattatctgatattcgaaagcatgatattggttttatttttcaagaatataatttacttcatacattaactgttaaagaaaatatcatgttaccattaacggttcagaaattagataaggacacaatgttagatcgttatgaaaaagtggcagaagcattaaatatattagacatcagtgataaatatccatccgaattgtctggtggtcaaagacaacgaacatcagctgccagagcatttataacattgccttctataatatttgccgatgaacctacaggtgcactcgattcgaaaagtacacaagatttattaaagcgattaatgaaaatgaatgaagagattaagacgacaattattatggtgacacatgatccggttgcagctagctatgcaaatcgagtagtgatgcttaaagatgggcaaatattcacggagttatatcaaggtgatgatgacaaacatactttctttaaagaaatcatacgtgtacaaagtgttttaggtggcattaattatgagttttaatgagattatatttaaaaatttccgccaaaatttatcacattatgccatttatcttttttcgctaattacaagtgtagttttgttttttagcttcgtagcactaaaatatacgcatagcattaacataactgagacatatcccattattaaagaaggatcgcaagtaggtagttactttctattttttatcattgttgcctttttgctatatgccaatgtactatttcttaaacgtcgtagttctgaacttgcattatatcaaacattaggtttatccaaattcaacattatatatatattgatgtttgaacaattattaatattttcaataacagctatattgggcattacgattggtatctttggttctaaaattttattaatgatagtgtttactttattaggtatcaaagaaaaggttccaattattttcagctttagagcagtttttgagacgctattattaattggcgttgcttatttcctaactgcagctcaaaatcttatcttagtattgaaacaatctatttcagaactatcaaagcataatcaggctaagcaaatgaatcataataaaattacatttgaagaagttatactaggaattctaggtattattttaatcatcagtgggtattactactctttacgcattgtacattactatgatgcaattggcgtccttatgtttatattgtttgcgacagtaattggggcgtatttattttttaaaagttcagtatccctggtatttaaaattattaaaaggtttaaaaaaggtgtaataagtgtaaatgatgtcatgttttcttcatctattatgtatcgtattcagaaaaatgcattttcacttactgttatggcaattatttcagctattactttatcagtactttgttttgctgctatcagtagagcaactttatcaagtgaaattaagtacacgtcacctcatgatgttacgattaaagatcaacagaaggcgaatcagttagcaagtgaattgaacaaccaaaaaattcctcatttttataattataaagaagtgattcatacaaaactttataaggatgacttatttgatataaaagcaaaagaaccatataacgtaacaattactagtgacaaatatattcctaatacggatttgaaacgtggtcaggctgatttatttgtggcggaaggagctattaaagatttagtgaagcataagaaacatggtaaggcagtgataggaacgaaaaaacaccatgttgatattaaattgcgtaaagatatcaataaaatttactttatgactgatgttgacttaggtggaccgacgtttgtgttaaacgatcaagattatcaagagataagaaagtatactaagccaaaacacattgtttctcaatttggatttgatttaaaacataaaaaagatatgttagcattggaaaaagcaacaaataaagttgacaaatctattgaaacaagaagtgaagccataagttcgatatcgagtttaacgggcatattgttatttgtaacctcatttttaggaattagtttcctaattgccgtatgttgtatcatatacattaaacaaatagatgaaactgaagacgagttagaaaattatagtattcttagaaaacttggatttacacaaaaagatatgtcaaaaggattaaaatttaaaattgcgtttaattttgggttaccattagtcattgcactttcacatgcatactttacatcattagcatatatgaaattgatggggacaacgaatcaaataccgatatttatagtaatgggactatatatttgtatgtatgccatttttgcaataacagcttataatcattctaagcgtacaatcagacattcaatttaatatatatatatagcggctttcagtagagtagtggattcggattcacgaactatactggaagcttttatttttggatagttatagatccgggcacgacagttttaatgtatatgtttcaactttgtaaattgtattaaatgtgagaaaatagagctataggtattgaaagaaatatgaattaagaatagttagaagaaagataagtgtgttttaatatgtaaaagttatgtaataaatattgcatcgttgtttaatttccaactatgtccaattacaattattagagttttgtagataacaaattgcctatatatcaagtttttcaaaacaaatgtctaccactatttaaattttatgtaaaagttaagtttcggaattgttaaaaatttgtaaattgaattgtgggattgtaaattttgtgctattttcatataagggcaaatacagtaaattgtttactgtgaggcatttttgaaattaatatcagtacactaaaaatatactgacgattgataataacaaatttgtatcattagtttgtaaattcacttgtcttaatttgaaacaaattataactgaatgtgattggtgacaatcgcttaaatggaggattttaaatgtttagtaagaaaaaagataagtttatggttcaattagaagagatggtttttaacctagatcgtgcagctattgaattcggtaaaatggatttcaatacacatctagatttaaaagcatactcagacaacattaaaacttatgagtcacatggtgacgaattagtacatcaagtaattactgatttaaatcaaacatttatcacaccaattgaacgtgaagatattttatcattatgtgatgcaattgatgatgttttagatgcaattgaagaaacggcagctatgtttgaaatgtattcaatcgaatacacagatgaatatatggctgagtttgttgataacattcaaaaagcagttgcagaaatgaaacttgctgtcggcttattagttgataaaaaattatcacatatgcgtattcattcaattaatattaaagaatttgaaacaaactgtgatggtattttaagacagtcaattaaacatattttcaatagcgaaacagatccaatcactttaattaaaataaaagatatttatgaaagcatggaagaaattgctgataaatgtcaaatcgtagcaaataattttgaaactattattatgaaaaatagctaaggggagtatatatttatgtcatatataatcatcgtcactatagctgtagttattttctcgctgatatttgactttatcaatggattccatgatacagccaatgcagtagctactgctgtatctactagagcgttaacgcctaaaacggcaattttaatggcagcagtgatgaactttataggtgctttaacatttacgggcgttgcaggcaccattactaaagacattgtcgatccatttaaattggaaaatggattagttgttgtgttagctgcaatacttgcggctattatttggaatttagctacttggttttacggaattccaagttcgtcttcacatgcacttataggttcaattgcgggtgcagcaatcgcatctgaaggctcatttggcgtattacattaccaaggtttcacaaaaattattattgtattaatcgtgtcaccgattatcgcattttgtgttggtttcttgatgtattcaatttttaaagttatctttaaaaatgcaaatttaacaagagcgaatcgtaactttagatttttccaaattttcacagcagcgttacaatcattctctcacggtaccaatgatgcacaaaaatcaatgggtattattacgttggcattgattgttgctaatgtacagaatgatggcagcgttgaaccacagttatgggtaaaatttgcctgtgcaacagcaatggggcttggtactgcaattggtggctggaaaattatcaaaactgtaggtggtaatattatgaaaatacgtccagcaaatggtgctgcggccgatttatcatctgcattaacaatttttgttgcatcatcgctacatttcccattatcaacaactcacgttgtgtcatcatcaatcttaggtgttggtgcttctaaccgagctaaaggtgtaaaatggagtactgcgcaacgaatgatcattacatgggtgatcacattacctatttcagcattgttagcaggtttactattctatatacttaacttatttttctaattgaaaataaaactaaactgaacttcagtatcacaaagatatggtggtattgaagttcagttttttatgtaaatagataacatattttatagagtttacatagaatgaccaagacaaagcattttaatttgtggctaagttataaatgtattccatggaacataaacagttaggtcattaaaatataagtaagcgtaaaataatgatttaatagtttatattcttcaatggatgaataattaaatagctatcaacttgtttaattaacctaaattgtattggactttatttaatataaatttgtatatgtagacgaaaaagcgtaaaatactggtataacaaattaaatcattatatagtcaacttagttgcattattttgatttttaatatattatgcatttaatttaattaaataggtaggtcataatttttacctaactaccattcatacaaaatataaataagtatgatagggaaaggtgagataattttttgtaccaaaatgaaaatttttttcagaaataaaaaactagcaatatcacatgatgtgaattgctagtatatatcagtacaatttatttaattaatggatgaatgcatagctagaaacttctgaagctggaattgtacggtagttcatattgtatggaccatatgtgtaattcatttcagaaatcaagatactaccatcaccattgacacgttcaacataagcaacatgaccatatggaccaggtgtgctttgcatgattgaaccaactgatggtgtgttgtttacttggtaaccatcattagctgcgttaccagcccaatacttagcgtctgaccaatatgtgctaattggactaccagcttgagcacgacgatcaaatacgtaccatgtacattgaccagcagtgtataaattttggtgattaaaagatgatgcattgccattgctacctgttgtagctgttggtgttgtaccacctgatccaccattaggaatttgtaatgtttggttaggcataattaaataaccacgtaagttattggctgccattaattgatcaactgaaacaccatatctgctagcaatgatatttaaagattcaccagcttgtacagtatgagatgatgctgagccagcttgtggagaagtgtttgatgtattttgtgcatcacttccacctactgagataacttgaccagggaataccaagttgttatctaattggttattttgtttaatactctctactgaagtgttgtatttttgagcaatactccataatgattcaccagattgtactgtatgttgtgtagatgcttgtgcatcatgatgcgttagaaatgcagctgcaccagatgttgctgttattgcaaatgctaattttttcaaagggactcctccttaaaattaagatttactacttttaaaaattattaagacaatttatatagtaaattaagttttcgttttatattacgctttccatattatcaaaaataagtagctttgtgtggtttgttattatcttgtaatattattaacattttaggatatcggttcatatttttataaatgctgatttgatagtgtataaaagcgttttagtgattttaactaattataaaaaattatattttgtaacattgtaaaatgtaaaattactatacttgttaaaggttatttcttttgatgaagcaaaatttactgtaaaatttgacgcataaaacgacagtagaaggaggaattattttgtcgcaaaatacaaatcattcatattttcagcaaaaccagcatgctcaatcaataagtaaagtgtggctttattttatgtattactggattatctttggcataggatgctatctaggtcagtttttaccattaagttggcgacaacccttgtcatttggattactgattattattttagcaacacttgtttttgaaagagcgagacggttcggtttaattatttcacatatttacgctgtagtaattggcttattgtcatacgcaacgtttaccacgtatttacaaaatttaggacctgatattttctataaaaatatcacattagcaatttttgcatttatagcatttggtattattggttatttcttcgttggagatgcatcgagtataggcaagtatttattcgttacattaataacattaattattgcgagtctaattggtatttttcttcaaaatcctattttttatactattattaccgtcgttagtttattgttatttctactttatactttgtatgattttaatcgtttaaaaagaggtgactattcaccaagagaaatgggatttaatctatttattaatttgttgaatattattaaggatatactttatcttgctaatatgttcagaagataaacagttaaattaataaagaaattcatatgaagttttagaataatcaataatgaatatcaaccttaaattggagcgattgtcataaattagaaatttagatagagattttactgataaagcaataaaaatatattaccttaattgtaaagatattattaatcattgaaatgattaactgctatagttctaaagtgaacaaatcttagaagataaactttaaacaggtgtacttgcctttctaattacacttttattagaaaagtaaagtatagctacgtattaattttaaaatcgaaatattaataggaataagtataaataatataaaaaatttaatgttagtttgagctcatctcaaaagtagaatgtgatttaaataagtgtttatttttaaattgaaaatgaatataaaactaacaaaagataatagtaatacgttgtagatgtggtcatttaaaattattttgaaaatactaaaaagtagtgtgttttcaattggatagtttaattaaactgactacatctatttttgtaatatttaaatgattgatatatgagtttaaaaattaaccattatatagttttatttatttttgatttggtattcgtattgtgttaaatttacgtttaattaaataagttaaatattatagggaatgataaaagtggtatttaaatatagaaagaggtaaagttatggcaaaatcatgcttgcatatacttactaataatgaatatgcgacaacgcgttgccaagatggcatagtcttattttggccaattgacggggaaatcgaactacaaaaatttcgtaaaagtaaaataattgaagatgatatatatatcattaatcatctggatgtatttagtattaagaataataaaaaaacgatcatgttgtatttgagtagcgattggtttgcggaattaggctttactttctttaattatcactatacagcaaagttaattaaatcatcctataatttgaaatgcttattattaaaattgacatatcgataccttgataatcagcctattaatgacgctgatattagaaaattacaggatattattaaaatcattgcaaaagaagcaagtatggataaaaagattgcgcaaaatcaatatcgttatgcttattatggtgatttgcgagatgagctcgaatatatttatcaaaatgtaaatcaacgattgacattaaaaagtgtcgctgataaattatttgtttcaaagtcaaatctgtcttcgcaattccacttacttatgggcatgggttttaaaaaatatattgatactttgaaaattggaaaatccatagagattctacttactacagatagtactattagcaatataagtgaacatttaggatttagtagcagctcaacgtactctaaaatgtttaaaagttatatggatataacaccgaatgaatatcgtaatttatcaaaatttaataaatgtatcatgcttaatccagagccacttgtaggcggtatggcgcaagaagtaaaagaagtcatattgaattatattgatcattataaaaatcacctaactgatgttatacatattgacgaagataaatttgaaatacctaagttatttcaaacggttattcaaattaatacttatacagaaatgaaactagttttcttagaagggatttttaaaaccttattgaataagaacagccaagttgtctttttcatcatgccatcgattttaaaaagtaaaaataccatgtccgaagaagaaaagtttacaatcattaaaaccataattgaaagtgatttaaagatagcatttaatataaatgatattgaaacgacttattatgttgaagaagcttttatgaatgttattagacaattatctccaaacgaaataaatcatcataataattacgaagtgcattttgtttttgatttatcattgatggaaattaggacaatttaccgtatgattttaaaactacataacatcatgttaaatgtgaaattaggattgaatattacctgtttatttgataaaccttcagtttttaaatcactagtatcacaaataaagcgacttaaattcgattcgttaataatagataatgcaaatttaagtagcccttatttgatgggggaaagtgatgagttactattgaaaaatattttgcattttaaaaatttaaaacaagttattaacgaattggatatagaacaagaaaagctgatttttctaaatgttgaaaatcataaactgcttaataataaagaacgagatttaagtaatagtgctccattaatttataagacattaagtgcgctgtatcataactttgatggttttggattaaacatttttgataatcatcaaacatttaatgcgatgcatctatatgataaaaatggatttaaaacaacactaggtcttatattagaaaagtttatcgaatatgtctcgaaaccaaaatacgaaaacagttattattctatttttgatatagagaattattattgtctggttatttatgattggcgagtgattgagagcgagacaattatgagcaattttgaagatagtcaagtttatataaatttcaaaaataatgttttaaacgataaatatctaattgtaatagaaacgttagatgaaaatagtgggaacattaatcatttgatctctaaagaattaagagataaatatgaatggaaccccagtttactctctaaaattgacaactaccttaaaccggcaatcgagattaaagagcataactttagtaataattccttaaatattaacgttacttttaatgcgttatacataattaaaataggaaaaaaataacaccttgatatgtattgcaaaatttaatttgcatttgttggtaattttgacaacgtattaaaaacaaatgagaaagacaatggcagaaaaatttaagataataatgacagaagcattgtctttatatatttgggggtgcaacattttgaatactgagaaattagaaacattgcttggcttctataaacaatataaagcattatctgaatatattgataaaaaatataagttgtcgctaaatgatttagcagtcttagatttaacgatgaagtattgcaaagatgaaaaagtacttatgcaatcatttttaaaaactgcaatggatgagctagatttaagtaggacaaaattattagtttctataagaagactaattgaaaaagaaagacttagtaaagttagatcatctaaagatgagcgtaaaatttatatttatttaaatgatgatgatatatctaaatttaatgctttatttgaagatgtagaacaatttttaaatatttaattgaaattgagtgtcgaaagcatagaaattgcttatcggcacatttttaatttatacatattttaaaactaagtaacagattgaagaaatcgtagttcaataatgttaattgtgaaaatgtatataatcataaaaaaatcatgtataatatatgttgttaattaaacagttcgaaagcgagatgacattatgggacgtaaatggaataacattaaagaaaaaaaggcccaaaaagataaaaatacaagtagaatatatgcgaaatttggtaaggagatttatgttgcagcaaaatctggtgaaccaaatccagaatctaaccaagctttaagattggtacttgaacgcgctaagacatattcagtaccgaatcatattattgaaaaagcaatagataaagctaagggtgctggagacgagaactttgatcacctaagatatgaaggatttggcccaagcggatcaatgcttattgttgatgcgttaacaaacaatgtaaatcgtactgcatctgatgtgcgtgctgcttttggtaaaaacggcggtaatatgggtgtatctggatcagttgcatatatgtttgaccatgtggcaacgtttggtattgaaggtaaaactgttgacgatatacttgaaacattaatggaacaagatgtagatgtaaatgatgtgattgacgacaatggattgacaatagtctatgctgaaccagatcagtttgcggttgttcaagatgcgcttcgtgcagctggtgtagaagaatttaaagtagcagaatttgaaatgttacctcaaacagatattgagctttctgaagaggaccaagtaacatttgaaaaattaatcgatgcattagaagatttagaagatgtacaaaacgtattccataatgtggatttgaaataatgaaaacagcaaaacaatggattaatgaattacaactcgaatcgcatcctgaaggtggtttttatagagagacgatccgagaagtattaaaagatggacacagagcgccgtttagcagtatttattttttacttacagatgacaatatttcgcattttcatcgaattgatgctgatgaagtatggtactatcatgccggtgattctctaacaattcatatgataaatccggatggagcatatacgacagcaacattgggtactgatatccaaaatggagatgtattgcaatatgtagtgcctaaaggaacaatttttgcttcttcaattgaaaatttaaattcttatagtttagtaggttgtatgtgtcaaccggcatttgagtttaagcaatttgaattgtttaagcaatctgaattatttgttcaatatccgcatcttaaatcagtaatcgaaaaatatgctttaaaataaaaagaatcaatgaagtggtttgaaggttgttaataaacctttgagtcacttcatttttatatgtattcttgattgaatcagaatagatttgatgcttcagctgtttttaatgaaattaacattaaatggttttgaaaatgataagactataatatttatatttttgaaaaatcacttttatgaagaaatgtgtgtactatctaattaatattgtctattttaagtaaattgaagcgagttgtagtaaaataataataaatattttcatatgattaacaaaaactataaaactgtatcataacatgacatcatttatgtagttttatataataatgacaaggagttggtgactgtgaaagtaaagtatatagataaacgtcactggcgtcgcctaattgatagggaatacacagaggtaaaagttaataataataggtttaaaggtattataggcttagtcacgatgaaaaaggttcgtgatcctttagaggtgacggtagttggacaaaatatcattgtcgcagatgacaattataaatggttgcaaatactacctgaaaaaaaacgttatagtattactgtaatgtttgataataaaggcaatccattagaatattattttgatataaatatcaaaaatataacgcaaaaaggtaatgcgcgtacagtagatttatgtttagatgttttagcattaccaagtggtgaatatgagttggtagatgaagatgatttaatgtttgcattagaaagtgagcaaattacaaaaaagcaatttcatgaagcatatatgattgcacatcaaattatggcagagttagaaaatgattttaaaggattccaaaagaaaattatgtactgctttaataaaattaatgcaaaggctcaaaaaaatcgtcaaaagccacaaaataaaactaattttgaaaaaagtaaacaaataaaacctaagcaatataatcaaactaaaaatcaccaacaacaaaagaaaaactaagtaattcaagctgcagccataccaataaaattggtgaaattattcgttagttatgaactcatgaatgcttgtagccatgaaagttcaataattgaataatttatggggggaaattatgaagattgaagactatcgtttactaataacattagacgaaacgaaaacgttacgtaaagcggctgaaattttatatatatctcaacctgctgttacacaaagactaaaagctattgaaaatgcttttggagtagatatttttatcagaacaaaaaaacaattgattacaacaactgaaggaacaatgattattgagcatgcccgtgacatgttgaaaagagagcgattattttttgacaaaatgcaggcacatattggtgaagtgaatggaacgatatcaatagggtgttcttcattgattggacaaaccttacttcctgaagttttgagcctatacaatgcccaatttccaaatgttgaaattcaagtacaagttggttcaactgaacaaattaaagcaaatcatagagactatcatgtcatgataactcgtggaaataaggtaatgaatttagctaacacacatttatttaatgatgatcattattttatttttccaaaaaatagacgagacgatgttacaaagttgccattcatagagtttcaagctgacccgatttatataaatcaaataaaacaatggtataacgataatttagaacaagattaccatgcaactattacagtggatcaagtagcaacttgtaaagaaatgttgattagtggtgtaggagttacaatcttgccagaaattatgatgaaaaatatcagcagagaacaatttgagtttgaaaaagtagaaattgataatgaaccactgattcgttcaacgtttatgagttatgatccgagcatgttgcaattgccacaagttgattcttttgtaaatctcatggcgagctttgttgaacgacctaaggcgtagttttagactaatttaaggttagtatttaattttaatctattcgattaaattgaacgcagttggatgctaacgcaccaacacagaagctgacgaaaagtcagcttacaataatgtacaagttggggtgggacgacgaaataaattttgcgaaaatatcatttctgtcccactcccataagagcccctaattaataaattaaaaggggacaaaggaatacagttggatgctaacgcaccaactgcataagagcccctaattaataaattaaaaggggacaaaggaatacagttggatgctaacgcaccaactgcataagaacccctaattaataaattaaaaggggctctaagaagcggggttatggatatgtttgcagcgttattacaaataaagaattataaactctttgttgctaatatgtttctactaggtatgggtattgcggttacggtcccatatcttgttctttttgcaactaaagatttaggtatgacaacaaatcagtatggattacttctagcatctgcagcgattagccagtttacagtaaattcaattatcgctagattttcggatacgcatcactttaatagaaaaattattattattctcgcattattaatgggtgcgcttggtttttcaatatacttttttgtagatacaatctggttattcatattactatatgcgattttccaaggattatttgcaccagcaatgccccaactttacgcatctgctagagaatctatcaatgtttcaagctctaaagatagagcccaatttgccaatacagtattacgttcaatgttctcattgggctttttatttggtccatttattggtgcgcaattaatcggattaaaaggctatgctggattgtttggtggaacaataagtatcattttatttactttagtacttcaagtgtttttctataaggatttaaacattaaacaccctattagtacgcaacaacatgttgaaaaaattgctcctaatatgtttaaagacaaaacgcttttattaccatttattgcatttattttattacacattggacaatggatgtatacgatgaatatgcctttatttgttactgattatttaaaagaaaatgagcaacatgtcggttatttagctagtttatgtgctggtttagaagtgccatttatgatcattcttggcgttttatcatctagattacagactcgaacgttgttgatttatggagcgatttttggaggtttattctacttcagcattggggtatttaaaaacttctatatgatgttagcaggacaggtgtttttagctattttcttagcggttcttttaggaattggtattagttatttccaagatatcttaccagatttcccaggatacgcctcaacactattttctaatgcaatggttattggacagttaggcggtaacttattaggtggtgctatgagtcactgggtaggtttggaaaatgtattttttgtatcagcagcatcaatcatgttaggtatgatacttatattctttactaaaaatcaaaaaattacaaaagaggatgtgatatcaacatgacaattattttatggctacttatcatcgctgccttcatgttagcatttgttgggttgattaagccgattattccttctgttttagtattatgggttggctttctaatctatcaatttggctttcataatcagcatttatcatgggtgttttatgtatctatggcattgctaacaatattaattttatgtgcggactttttagctaataaatattttgtgaatcgcttcggtggttctaagtttggagagtatgcagctttaattggtgtcgttattggatgttttgttttaccgccatttggaattattattataccttttattttggtattcatagttgaattaatacaaggctattcatttgaaagagcagttaaagtaagtataggttcaatcgtagcatttttaacaagtagtatagctcaagcaatcattatgtttataatgattgtatggttctttatagatgctttattgattaattaataaaaagcttattgcaaaatatgtttttcggtaactgtaatttagtgattttatcattaacagtaccaaattagcatatgatgtaataagctttttgtttataaaaatgtatgagaatgttttttcgaaatatttctttcaatgcgtaatccaataggcataactataaatgaaaatataataaatacccaattgcttacctgaatatatggtccaaaggcaagtaatgattgtggaataaagaatacatagaaaaatcctacaattagtagaatgattgctaaataggtgaatatccatatccaatttgaattgttaaaacactgcagttgaattgttttaaaactaaaccatataaataaaaagacaataaagaatccaacgactactgaaaacgggaatgaaacaaaatataaattacttccacttttttccatgaaaaatcctaaaaatcctttgagaaaactaacaataccaattaatagaacgatgtgctgatatatatatttaaaaatatttttaaatgtttcattaggcatcgcttttagttcttttattgcatgtgctttagggtcatgattgaaaaaatctaaggctaataaaccatgttgttctgcgcttaataattgtttaagtatacggttaataattaactctgtatcatgaggattgacgcgaaagtcagagcgcatataagtcatataattctcgaagatttctctatcagtattgcttaatcttaatgatttaacattattttcttttgttaattgcgcagtacttttcattgttacttaagcgctcctttaaaaaatgtttaattccaaattaaaatggaaatgattttatagtattaataaggtcaatcatatcatattaaacgcataaatataacgattaatattggagaggaaaatgaggacacttaataaagatgaacataattatatcaagcaaatagctagtatacatgagacattattgtcgcaatcagaatccaactataaatgtactaaactgagtattgctcttaggtacgagatgatttgttcaagattagaacatacaaatgataaaatttatatatatgaaaatgaaggtcaattaatagcgtttatttggggacattttagtaatgaaaaaagtatggttaacattgaactgctatatgttgaaccacaatttcgcaaactgggaatagctacgcaactgaagattgcgcttgaaaaatgggcaaaaactatgaatgcaaagcaaataagcagtacaattcataaaagtaatttaccaatgatatctttgaataaagatttaggttatcaagtgagtcatgtgaaaatgtataaagatattgattagaattaggactatgttgctaattcatgttaaaattaaaaaagatttaatgacgttaaggagttttatatgaagaaattaatcatcagtattatggcggtcatgctatttttaacaggttgtggtaaaagccaagagaaagccactttggaaaaggatatcgataatttacaaaaagaaaataaagaattaaaagataaaaaagaaaagcttcaacaagaaaaagaaaaattagcagataagcaaaaagaccttgaaaaagaagtgaaagatttaaaaccttctaaagaagataacaaggacgataaaaaagacaacaaaaaagacgaagacaaagataaagaggcatcacaagataagcaaccaaaagatcaaactaagtcatcgaataaagataatcacaaaaagcctacatcaacagataaagatcaaaaagctaatgacaaacaccaaccataattgaattgcttacttgttatatatgaaaggtacagcgttttaaaccttattttaagggtatgtattaattaaaatggggtcatgattgaaacagaacgtaaaaatagacatcgtaattaataaaggagagaaacggcatgcatgaacaagattttagaattttagagggtcaagatattactttgccagaattaggtagagaattagaaaatattactggacgcacgattgctgattctactggcgaaattaagcgtgtaattgcacatttaccaaactttgagtccgatacagatacttttgttgctacatatcgtttaaaccatcaacaagattttatagatgcaacttttactgcgctgaaatcagatagagcacgtttaaaagaagtgccagttcatgttgaacttataagttatatttctaaatcaaaatagactgctatctaaaacgcaaagttgatcaaaatatcgattttgtgttttttattgagaaattatataggagtgtcaatcgatgatttattgtgaaacagagcgtttaatattaagagactggcatgaagatgatctgttaccttttcaaaaaatgaatgcgacttatgacgtacgtaaatattttccaagtttattgagttatcgtcgttcagaattagatatgagaactatggatgcggttattaaagattatggcattggattatttgctgtagaagataaagagtcccatcaatggataggctttataggtttgaattatattccagaaacaagcgagtatccatttaaagaattaccgctttatgaaataggttggcgcttgttgccagaattttggggaaaaggattagcaactgaaggcgcaaatgcaacgttgaagttagcagaacaacatcaaatatacgatgtctatagttttacagcagaagcaaataaagcttcacaacgtgtaatggaaaaaattggcatgacagtgtatgatcatttcgaattgcctaatctaagtaagtatcatttattaaaaaggcaagtgcgttattacattaatcttcgaaagtgaaaatttatacataagcgtaacaaacacccctaatattgtttagctgatgataacaatattaggggtgtttgtttattttttaaccttagaatgattaatcgtatgaacgagtacctagaggtttgaaattcaatattgattctattaatgattccttagtgtcgcataacggtgcaagtgcacgatacttaggatcaataaaaccttcttcaatcatatggtcaatcattgtttgtagtgggttgaaaaagccattaatattataaatggcaataggcttttcatggatacctatttgagcccaactatacatttcgaaaaattcttctagtgaacctgcgccaccgggagccatgacaaatgcatctgcaagttctgccattttatttttacgttcatgcatagaatcaactaaaattaattcagttaaacgttggcttgtgatttcatgttcatctaacattttaggcatgacaccaatagctttgccaccatgatctaatacaccatcttgaatggcacccataataccaattgaccctgcaccaaatactaattcataaccttgttcagcaaaatatttacctaaattgtatgctttttgtacatatgaagggtcatgacctttgcttgcaccacaataaactgcgattcgcttcatattaatccagctccttaattcgatgaatgactcttaatagtgattgttcaaacactttttgatcttgctttgtaaaaggtgggggacctttgtggcgaccaccttgttttctaatttgtgcatttatatatcgtttatctaatagttgttgaatatttttggaattgtatatcttcccattatgatgcatgacaattaagactttgtcgactaataaacttgcgagtccataatcttgagtgattacgatatcatctttcgttgataattgaacaattttgtaatcaactgcatctggtccatcatcaacatataatgttgatacatgtgggggatataattggttcgaaaaatggctgaagctccgaataattgtcacaaaaatgcctgtctcagttgttaaatctataatagaatcaacaacaggacaagcatctccatcaataataatatgtgtcacaattatgcctctgtattgttttctttattttgttgagaggcgcttttggcaacataatctttatattttttaaatgacttgatgcgtgctttatcagcttcttgttggcgtttttgttcttctttgtgtcgtttttcaatatttttttgtaactttttattcattttagcgatttctttgcgatttttttcagctagtttatcgccttttttctcagttttctcatctaatttattaggtgttaagcctgctttttcttcgtatttttgtgtttttttcatatctttaatacgttgtatttcattcttttcgcgggctttttgctcttctttatgacgcttttcgatatttttttgaagtattttattcattttatcagcgtctttacgattttgtttagctaatttttcgccttttttctcaatataggcaggatcatgttctctagcaaactttttaagttcacgcttattttcaaaatcttgttttttatcgccgacatattctttaacatcactcgctgtgttactgattgctgcagatgtttttgaagcaactttacttgtagcatctgtaactttttgtacgtccggatgttgtttgatacgtttacgttcaacaattaacggtaccaatacaattggtaatacattaatcataaatttgatgacttttttcttatccatagatcttgcctccataattactttattaattttacataccctatgatacatcaatataaacgatgagagtagtgaatcacttataagtatttcagatgtttttttaaagaagacaataaaaactgccaatcaagtggttccttaattgacagtttatattttaaaaggaaattaaatacctttaccaatgccaaatccgaagtaaagtatagcaataaagattactaatacaattctgtaaatggcaaatggaattaatttgattttgttaattagatgcaagaatgttttgattgcaattagtccaacagtaaatgcagctaaaaagcctaaaatataaaaaggtatatcagcaatctgaatatcttgataatgttttaataaagataaaccactagctgctaacataattggaacagccataataaatgtgaagtccgatgctgctttatgatttaatttcattaatacaccagttgaaattgttgagcctgaacggctgaaaccaggccacatagctactgcttgagagataccaattacaaacgcttggaaataattgatttgatccactgtttgtgggtttttaactttaactgaatacttatcagcgataatcatatagatagcacctacgaataagccaatcataacagttggcacactaaataaatgttcttcgatgaaatcatcaaatagtaagcctaaaatacctgctggaaccatacccactaatacatgtaataaatttaaacgtcttggctttgaacgtctttgttgattgttttctccttcaacatgtttgtgtttaccaatatgtaaaatctctaagaagcgttcgcggaacacccatgctgctgcaaagacggatcctaattggatgacgattttaaatgtaaatgctgattgagaacctaaaaattcagatgattttaaccacatatcatcaactagaatcatatgtccagtagaggaaacaggtgcaaattctgttaatccttcgacgatccctaagataataccttttattaattcaatgataaacataatgtacccactttcattactcaatttaatttatttaaatatcaaaattaccatatcatgatagcatattcatttaaagacatgctagttatagttataatactagactaaagatgtatatattcattttcttttacatgtaaaactacaatattttattgagctatttaatttgattttaaggaaaaccttttataataggtttaggtgatataattgtgaaaaaattaacaacaatactgtttcaatataaaatttttccggtactcatgttcttggtcagtactggtctcggcatactcgttatagcgcaaaatattttaatagcagattttttagctaaaattataagacatcaatttcaaggtttatggattgtattatttattttattaggtgttttactcttaagagcaactgtgcaatttctaaatcaatggttaggtgatacattagcatttaaagttaagcatatgcttagacagcgggttatttataaaaataatggtcatccaatcggtgaacaaatgactatactcacagaaaacattgatggtctagcacctttttataagagttatttgcctcaagtgttcaaatcaatgatggttccgctcatcataatcattgcaatgtttttcatccatttcaataccgcattaattatgttaataactgcaccatttattcctttgttttatattattttcggtttgaaaacgcgagatgagtcaaaagatcaaatgacttatttgaatcaatttagtcaacgttttttaaatattgctaaaggtttagtgacgttaaagctatttaatcgtacagagcaaacagagaagcatatttacgacgatagtactcagtttagaactttaacaatgcgcattttacgcagtgcttttttatcgggattaatgctcgaatttataagtatgttaggtattggattggttgcattggaagcaacgctaaacttagtagtatttcataatattgattttaaaactgcggcaattgcgattattttagcgcctgaattttataatgcaattaaggacttaggacaagcattccatactggaaaacaaagtgaaggtgccagtgacgttgtgtttgagtttttagaacaaccgaacaataataatgaatttctattaaagtatgaggaaaatcaaaaaccatttattcagttaacagacatatcatttcgatatgatgattctgatagattggtattaaatgatttaaatttggaaatatttaaaggtgatcaaattgcacttgtaggtccaagcggggcaggtaaatcaactttgacacatcttattgcaggtgtttatcagccaacaataggtactataagtataaaccagcgtgatttaaatataggaatacttagtcaacagccatatattttcagtgcttctataaaagagaatattacgatgtttaaagatatagaaaataatactgttgaagaagtgctagacgaagtaggtttattagacaaagttcaatctttcacacaaggcattaatacaataataggtgaaggaggcgaaatgttatctggtggacagatgagacgcatagaactttgccgtcttttagttatgaagccagatctcgttatatttgatgagcctgcaactggtttagatattcaaacagaacacatgattcagaacgttctgtttcaacattttaaagatacaacgatgattgtcattgcacatagagataatacaattcgccatttacaacgacgtttgtatatagaaaatggaagactgattgctgatgatcgcaatatttcagtaaatataacagaaaatggtgatgacttatgaaaacacgactaaaatttcaagtagataaggatttattgttagctatagttgttggtgtttgtggaagtttagttgcgctcgccatgtttttcttaagtggttatatggtgacacaaagtgcacttggtgcgccactatacgctctgatgattttagtcgttacagtaaaattgtttgggtttttaagagctattactcgatacgtagagcgcctaatttctcataaagctacatttacaatgctacgtgatattcgggtacagtttttcggtaaattagtaaatgtcattcctaatgtttaccgtaaactgagttctagtgatttaatttcacgtatgattagtcgtgttgaggcattacaaaatatttatttacgtgtttattatccaccagtcgtcatcggtttgacagcgctagttacagtaatagtattggcgttcatttcaatcggccatgcgctattgattatggttagcatgttgtttactttactcattgttccttggttaagctcaaaaaaagcacgtactttaaagaaacatgcagctaatgaacaggctcgatttttaaatcatttttatgattataaagctggtatggatgaactacgtcgatttaatcaaattaatcattatcgagataatttgatggctaaattaaatcattttgataaattacaacttaaagagcaacgctttttaacgatttatgattttatattaaatattattgctatgctttcgatttttggtagtttagttctaggattaattcaaattaatgcaggccaactaaatattatttatatgacgagtatcgttttaatggtcttaactttatttgaacaagctgtaccaatgacaaatgtcgcgtattataaagcggatactgaccaagcattgcacgatattaatgaagtgatatctgtaccttctactaatggaaataaccgccttactgataagtatgacgcaacgaacatttatgaagttaaggacgctagttttaagtattggaaccagcaaatgtatgtgttatcggatattaattttaatgttaatagaggcgaaaagattgcgattgtgggtccttctggttcaggaaaaagtacattactacaaattatggcagggttatatcaattagatagtggctctattcgtttcgaaaatatggacatgtttgaaatagatgacaaagataagtttgaatcgttaaatgtcttactacaatctcaacaattatatgatggtacaatacgtcaaaatttatttaccgatgaaaaagatgaagcggtgcaagcaatatttaagcaattagatttagaacatttggcactagaacgtcaaattgacttagatggtcatacattatctggcggagaaattcagcgtttagcgattgcgaggatgttattaaaagatactgcatcaacatggattttagatgaaccaacaacggcattagataaacaaaatagtttaaaagttatggatttaattgaagcacatgcagaaacattaattgttgctacacacgatttaactttattgtcacgttttgagaccatcattgtgatgataaatggtaaaatagttgaaaagggaaactatcaacaattactcgctaatcaaggtgctttatggaatatgattcaatataatgcataaaaaaactgcttgataggctaagaaacctttcaagcagttttttaactaacaagcttacgcgtgctaattgtttttctattcttaataaattctaaacattactttaattgtcatgacaaaagttaattatttttcctttgtttcatcaaatgcatgaatgactttacctaataagcgattaagttctttaacttcatcttgagataaagaagaagctgaagcgactttgtcagatgcattacttaattctggtctaatagtttcacttttgtcagtcaagtgaataaatacttcacgttgatcgacttcggaacgttcacgcttaattaagtctacttgttccattcgttttaataatggtgatactgtaccagtatcgagtgctaattcagttacgactttcttgacgtttacaggagattcatcccataaaatagttaagacaagaaattgtgggtatgttagattgtacttcttaaaaactttgttagagtagtagcgattaacttgtctttgagcattgtacaaactaaagcatagctgttcttttaaattatgttgatcagacattaaagttctcctccagacatactatccgtttttttctcttttcggattggtaatcattaaaaagttgattgtttattaattcacaactttctttgattcaatgccatgctaaaattaaagtatgtttaaagtttagaagatatttttgattaaatcaagcaaaaagataatttaatatatatgttatcatttttaaaaataactgtaatagaaaagagaatataaaatgaaaaataataaagatgaaaaaataagaatatccataattaacggatttttgggtagtggtaaaaccacgttactgacacattatattagtgaattattaaaaaatgatgagaaaattaaaatcatcatgaatgaattcggtacttttgatattgatagcaatagtatttcaaatgaaattgaagtccattcattgattaatggttgtgtttgttgcgatcttaaacaagaacttgtctatgaactaaaagccattgctttaaaaggggacgttaatcatgtcatcatagaagcgacaggcattgcgcatcctttagaattactagttgcatgtcaagatccgcaaatcgttaatttctttgaaaagccaattatttatggtgtattagatgcgactcgatttttggaacgtcatcaatataccgaaaatacagtttcgctgatggaagatcagttgaaactaagtgacatgattattattaataaaattgatcttgtaactgatgacagtcttgagaaaattgataagcaattaagtatgatttgtgcaagtattccaacttataaaacaacctatggacaagtttcgttggaagaattggacttacttggtaaagacagagagatatcgtctcatcatcaccatcatcatgggattaaaagtatgacttacacatttacaggtccgattgatcgtcaattgttttatcaatttataatgaaattaccggaatctgttctacgtttgaaaggttatgtatcatttagagatcaaccaaatgcaatttatgaatttcaatatgcatatggtttaccagactatggaataattggcatgcaattaccattaacgattgttattattggtgaaactttagatacaaatcacatacgtaatcaattggatatgctacaatttacgtaaatcacaaaatgtgttgtttcaatttaacggaaatagcacattaatttcttaatacttttgttgtgaatattttgtgacattgagggatggagtggatgagatatggaacaaataatgattaatcactatgttcatttttctaggcttgtacaaggtttttggcgtgcaaatgaatggaagatgactgcgaaagagttaaattattttataaatgaattagttgaacgtgggattacaacgatggatcatgctgatatttatggggattatcaatgtgaatcactgtttggtaatgctttggatttatcacccgaattaagaaataaaattcaaattgttacgaaatgtggtatcatattgccttctaagcaatttgattttacaaatggacatcgttatgatttgagtagtaagcacatcgtgaaatctgttgaacagtcattaatcaatttgaatgtagattatttagatagtctactcattcatcgtccttcaccattgatggatccagaacaagttgctgatgcattaactaaacttgttaaacaaggtaagttgaagtcattcggggtgtcgaattttaatcattcacaataccaattgttaaatcaatatattatgaaagaaagactacatattagcatcaatcaattagaattatcgccatatcacgttgatagtttacaagatggaacaatggattcaatgtatcaaaaccatgttcaaattatggcttggagtccttttgcaggcggtaaaattttcgacaaggaagatattaaagcgcaacgtattatgaaagttattcaatcaatagctgacaaatatggtgtgagtgacacagctgtgatgatagcatggttagtaaaaataccgcatcgtatcatgccgatacttggaacaagtcagttaaagcgtattgatcaagcaatcgaagggctgcaacttaatttagatgatcagtcgtggtttgacatttacaccgctattatcggacaagatattccataaacttatttacttttaaatcataaaggagcatatcatgacaaacgaagataaacgtttcgaacaattaagatttgaacgcaaatttatagttattccgtatgtaatttatgcagtcattgtattactattaaatattttctattctgatttgaaaataacaatgacattattcggacttttctttgcgtataatgtagtcattttgttcatagcatttattaaacattataaacgcacattgttactaagtcttatattaacagtgcttagtggcgcggcattctttggaattatttatgtttatggcattaatcatttttaaatattaaaaagagactatctacaataatctcatttgcattttatctaactaagtttaacttttgcttagaaaaataatgctatgaggatattcagtagatagttttttatgttttaatatttaaacttagatatcgttttgtaattaaccgagataacatatcacctagcaatattatttacaaaatatttcgataaatttgtgtattttgcataaatcgaaaaaggatgtttataaaaattgttataattaaattgagattaaacaaaggggtgactgttatgtcagaagaaaaaaaggtagttaaacatgaacaacaaaagaaagaaaagacaaaaaagcaatacaagccattttggattgttatgagttttataatacttatagttgtactattactcccggcaccttcaagtctgccaataatggctaaggcagtactagctattttagcttttgcagttattatgtgggtaacggaagctgtatcatatccggtgtcagcaactttaattattggcttaatgatattacttttaggatttagcccggttcaaaatttaggggagaagctgggtaacccgaaaagtggcagtgctgttttagctggaagtgatcttctaggaacaaatcatgcattatcattagcgtttagtggatttgcaacatcagctgtagctctcgttgcagccgcattatttttggccgctgctatgcaagaaacgaatttgcataaaagactagctcttatagtgctatcaattgttggtaataaaactagaaatatagttattggggcaattattgtttcaattgtacttgtatttttcgttccttctgcaacagctagagcaggggcagttgtaccaatcttgcttggtatgattgcggcatttaaagtttccaaagatagcaagttagcgtctttattaataattacttcagtacaagctgtgtcaatttggaatattggtatcaaaacggcggcagcacaaaatatcgtagcgattaattttataaaccatcaattaggatttgatgtttcatggggcgagtggttcttatatgcagcgccttggtccatagttatgtctatagctttatatttcatcatgattaaagtgatgcctccagaaattaatacaatagagggtggcaaagatttaataaaagaagaattgcataaacttggccacgttagcgcacgtgaatggcgtttaattgttatatcgatgttattattactgttttggtcaactgaaaaagtattacatccaattgactctgcatccattactattattgctttaggtgttatgttaatgccgaaaattggtgtcatgacatggaaacatgttgaaaataaaataccatggggaacaattatcgtgtttggtgtaggtatttcactaggtaatgttcttttgaaaacaggtgcagcccaatggttaagtgatcaaacttttggtgttttaggtttaaaacatttacctattatcgcgacaattgcacttatcacgctttttaatatattgattcatttgggctttgcgagtgcaacaagtttatcatcagcgttaatacctgtttttatttcgctaacctctacgttacacttaggagaccagtctataggatttgttttaattcaacaatttgttattagttttggtttcttattacctgttagtgcacctcaaaatatgttggcttatggcactggtacttttacggtgaaagatttcttgaagacaggtataccattgacaattgtagggtatattctagtgatagtttttagtatgacttattggaaatggttaggtttgctttaattaaaaatataaataagaatctaggttattttaaagtgacaaaaagcttaataaaataaaaagataattgaagggtgttatatttatggcaattgctgtgttattaaatcgaatgtttcgaatggaacataatccattatttgaatatatttaccaacaaaaagaagacattgatgcatgttattttatcattccggaagaggacatgtcttcagcttctgatttgaaagcacagttttatcgcggtactttgaagcgcttttaccaatcgttgcacgcagaaaaactcacaccttatgtcatgtcttatgacgatatcatttcattttgtaaagaaaacaatatctctgaagtagtgattgcaggtgatattatgagttatcaccttgaagaatatgatattttacatcaacgctctttattcaatgaagcacgcattgccgttactttgatacgtgggaatcattactttaaagcgagtaaaacaatgaatcaacaaggggagccatacaaagtttttactagtttctataaaaaatggcgaccttacttgaggcatagagacgtatatcactatgatttaaaatcattcgaagacttcgtcattgcatcacctgatgatttagtgtttgatgacatagcatttggatcctcacaaataattgaacagaataaatggcaacattttttagatcaagatatacagaattacgaaagcggaagagactatttacctgaagtgttaacaagtcagctaagtgttgctttagcatatggattattagatattattgaaatttttaatgatttattggcgcgttatgatgaagatgaggcaaactatgaagcatttatacgtgaactcatttttagagaattttattatgtgttaatgacacagtatccagaaacctcataccaagctttcaaatctaaatatcgacagataaaatggtcgcaaaatgaagcggattttaatgcatggtgcgaagggcaaacaggatttccaatcattgatgcagcaataatggaattgacacaaactggttttatgcacaatcgaatgagaatggttgtgtcgcaatttttaaccaaagatttatttatagattggacatggggagaaaaattctttagaaagcaccttattgactatgatgcagcatcaaatattcatggatggcaatggtctgcttctacaggtactgatgcagtgccgtattttagaatgtttaatccaataagacagagtgaacgctttgatgctaaagctttgtatatcaaaacatatctcccgattttcaatcaaattgatgcaaaatatttgcatgatacacaacgcaatgagtccaacctttttgaacaggggattgaattaggtcgtcattatccaagacaaatggtagatcatcaagaaaaacgtacacaagttttagctgcatttaaagcgctagactaattcggctgaattgatagatcaggaatgagtaaaacctggagcagaatttaaagttcttaagcaatataaataagccaatttctattattgatgtgatagaaattggctttgctcaaatatataagttgtatttagttttcttattaatttggtgttatcttagtatgtccgtaaataaagtgaggtatagtacgacatactctaaaaatgtagcgagatagatatatttcaatctaacttttatgttttgaggcacttgccatttaggatattgtcgttcgtaatacgacacttgttgtataaatacacctagtccaaatggtagcatcatgagtaagatacttcttaaataacttaaaccaatatcatgccatatgtgtccaataatcaattgaaagacaatgatagatactattaaaacgattatatttattgtcacttgttcaaacgcactccttttccaaataatagaattgctgcttgcatcacaaccataaaacatacaaacatagcagttttaagcgtaagactttctagaatgtgatttagaacatgtaagggttcattaaagaaataaacggaatgtaagcgtaagaaacgaccaatataaattccgaatccatttaaaaacattagtacgacaacaattaatctattaagccaacggtgagaagtcaatgttagtatttcaaaatagattaaaatcatcacataaaccgctaagaagacaccaagcagtaaataggtaaagtatttccactcacctaaatttagtcctgcgtaaaagttgaattgaaattggttcaaatggattaaatcagttaccatataaaatgtatttggtaaaagtaacacaaatataaaactatatatgataaagagtggccattcatactttttattcggtttgaataatcgtaataatagactaagctcaaaaggtatatatgctaaaaacaaatttaaagtcataaattgaaaaattttagtctcaaaaagggagacgataaataatattaaaaagtaaattctagcgatgtatcgagattgcatcaataataaacactactttctaatgaaaaaagttattcattcaaatgtgatagttataaacgcattcaagtcctaattaaaaatttaatttaactcgttgaagtatattaataaacgagaatgcatttatgattaagcacttatgataacttgtaataaaatttgattcaactaaaaagtaaagtgctattgaggatcaagtaaatttaaaccgactgcatcgttgaatgaacgttgaatgtccaaatcagttacagtaagaatgatttcagcagttgcagaaacaattgctttagcgagatgtccgctaaaagtttcatatgattgagtaccgaaagtagcatgcaaatgtgcaaaatgaccattgtctagacgagaaatattacctaataagctcgtcaattccaatggctcagtaatatgtttttcttcgtattgtttcgttgttaaattgaaaaattttaaaacgacgtcatcacatgcaccaatgccgctgacagatgtaaatgttaagtcttggtcatctgcaaagtttgttatacattcaacgatatcttcgcctttttctaacactagtagtatagtatgattacttttttgcaatttcatatgatcaatcccctttattttaatatgtcattaattatacaattaaatggaaaatagtgataattacaaagaaaaaatattgtcaaatgtagcaatattgtaatacaatcaatatagaaactttttacgaatatttagcatgaattgcaatctgtcgtggaaaagaaaaataacagcttgaagagtgacaagtagaaaaaagaggtaagcaaatgaataaacagattttggtattatattttaatattttcttaatttttttaggtatcggtctagtgataccagtcttacctgtttatttaaaagatttggggttaactggtagtgatttaggattattagttgctgctttggccttatctcaaatgattatatcgccattcggtggtacgttagctgataaattaggaaagaaattaattatatgtataggattaattttgttttcagtgtcagaatttatgtttgctatcggtcagaattttttaattttgatgttatcaagggttatcggtggtatgagtgctggtatggttatgcctggggtgacaggtttaatagctgatatttcaccaagccatcaaaaagcaaaaaactttggctacatgtcagcgattatcaattcaggattcattttaggaccagggattggtggatttatggcagaagtttcacatcgtatgccattttattttacaggtgcattaggtattctagcatttataatgtcaattgtattgattcacgaccctaaaaaagtttcgacaaatggattccaaaagttggagccacaattgctaacgaaaattaactggaaagtgtttattacaccagttattctaacacttgtattatcgtttggtttatctgcatttgaaacattgtattcactatacacagctgacaaggtaaattattcacctaaagatatttcgattgcaattacaggtggcggtatctttggtgcacttttccaaatttatttctttgataaatttatgaaatacttctctgagttaacatttattgcatggtcattaatatattcagttattgtattagtgctattagttattgccgatggttactggacaattatggtaataagctttgttgtctttatcgggttcgatatgataagacctgctattacaaattatttttcaaatattgctggtgatagacagggatttgcaggtgggttaaactcaacattcactagcatggggaattttataggtcctttaatcgcaggtgcgttatttgatgtgcacattgaagccccaatttatatggctataggtgtgtcattagctggtgttgtcattgttttaattgaaaagcaacatagagctaagttaaaacaacaagatttgtaatatcgcacatggttgtcattcgattaatgtttttcgacaactaaagcatttcaaaataagcatcgattttcttacaattatagtgaagaaaagtcgatgctttaaatttataaagattaaaaacttttaaatgttttagtctttatatttaaatgttatatgtaacaaaaaatgattttgagtaataaacgtgttacaaatattacattctttttaaattgcaatccacatacctaattcattaacgttaatgtgttaagatgataaaaaatgagtaaggaaatgtgggtaaggggatgacagtaaaaaatttatttttaggctttgttgctgtaatattaactgtttgtttaattggtttattaattttagcaacaaatgaagatgcgcttgctaaggtacataaaacgattaatacgcttaacgcgataaatgtatcaactgaagatacttataaaaagaaaatggatattctcaatattcatactgctaaagcatctgaagtgaatgaaaatgtgaaaaagcaaaatcattttaagcatcgtgtgaatgcaaataaatcaaattcttttaacgaacaagagtgccaagttattgctgatcgttatgcagataagcatatcaatgataattatggtttagaaagaatttctaagacaaatcatggatataattatgtttattccaatgataattcaacgagtaagcaacatgtaagtatttcaaatcaaggcataataacgaaataatagatggaacagtgtattctaattggatatactgtttttattttgcaatattttaatttaaaaaggtgaaatcaacttataaaatgatgtaaatgttatgtcaaaatcaaccaatccgtaatgtattttaaaatgttaatatagttctgaagaagtataaatgaggtgttgaaatggctaaaaataagaaaacgaacgcgatgcgtatgcttgatcgtgcaaaaattaaatacgaagttcatagctttgaggtaccagaagaacatttatctggccaagaagtcgcagaactcatacaagcaaatgttaaaacagtttttaaaacacttgttctagaaaatgcaaaacatgaacattttgtatttgttatcccagtaagtgaaactttagatatgaaaaaggcagctgctatggttggagagaagaaattgcaccttatgcctttagataatttgaaaaatgtaacgggatacattcgtggtgggtgttcgcctgttggtatgaaaacattgtttccaacagtcgttgacaaatcctgtgaaaattatagtcatatcagtgtgagtggtgggcttcgaacaatgcaaatcacgatagctgttgaggatttgattacaataactaaaggcaaaattggagcagttatccatgaatgattaataacaacaaaaattatggggcaagattagagtgtgacagagatgaaatttttataaaattcatttctgccacactcctttttgattgaattagcattttacgatcataaacagtcatgataattgagtgtttgaacataaaaatgtaattttatcgtcacaatttgattgtttgtgattgtttttggtaatttatgattgaaaagtgaaagcgtactcattataatacagagtgagatggggtgatgatgataattacagaaaaaagacacgagttaatattagaagaactttcgcacaaagattttttgactttgcaagaattaatagatcgaactggatgcagtgcttcaacaatacgaagagatttatctaaactgcaacaattagggaaattgcaacgtgtgcatggtggtgcaatgttaaaagaaaatcgtatggttgaggcgaatttaactgaaaaattagcaacgaatctcgatgaaaagaaaatgattgctaaaatagcagctaatcaaatcaatgataatgaatgcctatttatcgatgctggttcatctacattggagctaattaaatatattcaagcgaaagatatcattgtggtaaccaatggtttaacacatgtagaagctttacttaaaaaaggtattaaaacaattatgctaggtggtcaagttaaagaaaatacacttgctacgattggttcaagtgccatggagatattaagacgatattgtttcgataaagcttttatcgggatgaatggattagatattgaacttggattaactactcccgatgagcaagaggcattagttaaacaaacagcaatgtcattagccaatcaatcatttgtacttatagatcattctaagtttaataaagtatattttgctcgtgtacctttgctagaaagtacgacaatcatcacatctgaaaaagcattaaatcaagaatcgttaaaagaataccaacaaaagtatcactttataggagggactttatgatttatacagtgactttcaatccttcaattgactatgtcatttttacaaatgattttaaaattgatggtttgaacagagcaacagcaacatataaatttgctgggggaaaaggtattaatgtctcacgtgttttaaagacattggatgttgagtcaactgctttgggatttgcaggtggatttcctgggaaattcattatagatacattaaaaaacagtgcaattcaatcgaattttattgaagttgatgaagatacacgtattaatgtgaaattaaaaacaggacaagaaacagaaatcaatgcaccgggtcctcatataacgtcagcacaatttgaacaattgttacaacaaattaaaaatacaacaagcgaagatatagttattgttgctggaagtgtaccaagtagtattccaagcgatgcgtatgcgcaaattgcacaaattacagcacagacaggtgctaaattagtagtcgacgctgaaaaagaattggctgaaagcgttttaccatatcatccactatttattaaacctaataaagacgaattagaagtgatgtttaatacaacagtgaactcagacgaagatgttattaaatatggtcgtttgttagttgataaaggtgcgcaatctgttattgtctcacttggcggtgatggtgctatttatattgataaagaaatcagtattaaagcagttaatccacaagggaaagtggttaatacagttggctctggtgatagtacagttgcaggcatggtggctggaattgcttcaggtttaacgattgaaaaagcattccaacaagcagtcgcatgcggtactgccacggcatttgatgaggacttagcaacacgggacgctatagaaaaaataaaatcacaagttacgattagcgtacttgatggggagtgaaaataatgagagtaacagagttattaacaaaagatacaatagcaatggatttaatggcaaatgacaaaaatggtgttattgatgagttagtaaatcaattagacaaagcaggtaaattaagtgatgtcgcgtcatttaagaaagcgattcacaatcgagaatcacaaagtacgactggtatcggcgaaggtattgctattccacatgcgaaagtagccgcagttaagtctccagctatcgcattcggtaaatctaaagaaggtttagattaccaaagtttagatatgcaaccagctcatttattctttatgattgcagcgccagaaggtggtgcccaaacacatttagatgctttagctaaactatctggtattttaatggatgaaaatgtacgtgaaaaattattacatgcatcgtctccagaagaagtgttagcaattattgatcatgctgatgatgaagcgacaaaagaagaagaggcagaagctgaagcacaacaagttgctgctgtagaagcaaatcaagacactaatggatcaaacgagccatatgtattagctgtaactgcttgtccaacaggtattgcacatacgtacatggcacgtgacgcattgaaaaaacaagcggataagatggggattaaaattaaagtagaaacgaacggttcaagtggtattaaaaaccatttaacggaacaagatattaaaaatgcaacaggtatcattgttgctgctgatgttcatgttgagacggatcgcttcgatggtaaaaatgtcgtagaagtaccagtcgcagatggtattaaacgcccagaagaattaattaataaagcattagatacaagtcgtaaaccttttgttgcccgtgatggtcaaagaaaaggtaactcaaatgacagtcaagaaaaattaagcccaggtaaagctttctataaacacttaatgaacggtgtttctaacatgttgccacttgtaatatctggtggtattttaatggcaatcgtgtttttatttggtgcaaactcatttgatccaaaaagctcagagtacaatgcgtttgcagagcagctttggaacattggtagtaaaagtgcattcgcgttaatcattccaattttatctggattcattgcacgtagtattgcggataaacctggattcgcttcaggtcttgtaggtggtatgttagcaatttcaggtggttcagggtttattggtggtattattgcaggtttcttagcaggttacttaacacaaggtgttaaagccatgacacgtaagttaccacaagcattagagggattaaagccgacattaatttatccactattaacagtgacagctacaggcttattgatgatttatgtctttaatccaccagcatcttggttaaatcatttgttattagatggattaaacaatttatcaggttctaatattgtattattaggtttagttattggcgcaatgatggcgattgatatgggcggtccattcaacaaagcggcatatgtttttgcaacaggtgcgttgattgaaggtaatgcagcaccaattacagctgcaatgattggtggtatgattccaccgttagcaattgcgacagcgatgttaattttcagacgtaaatttacaaaagaacaacgtggttcaattatccctaactatgtgatgggtatgtcatttattacagaaggtgcgattccattcgcggctgccgatccattacgtgttattccttcaatgatgattgggtcaggtataggtggcgcaatcgctttaggtttaggttctcgaattactgcgccacacggtggtattatcgtaattgttggtacggatggtgcacatttactgcaaacacttattgcacttgtagtaggtacattagtttcagcattaatttacggtttaatcaaacccaagttaactgaaacagaaatcgaagcttcaaaatcaatggacgaataacttttatgatttaaaatgattgtcagcaatgacgttacattaatttgtcagtcgattgaatatatgttaatttaatatgtcgtgttaacggtagtttatataaaactattaaaacaccttccattaattcagtttttatgaatggatgcgaaggtgtttttaattttagataaatgaatgaagaaatagacaccacaaatgtatagacttttttaatattttgcaaaaagttatgccaattggtgtagatatagtaaaatatgagtgtcttaaagtgaaaatttataaataaagaagggtttatacgtgtcagaattaattatatataacggcaaagtttatactgaagatggcaaaatcgataatggttacattcatgtgaaagatggacagattgttgcaattggagaagtgaatgataaagcagcgattgataatgatacgacaaataaaattcaagtgattgatgcaaaaggttatcatgtagtgccaggttttatcgatatacatattcatggtggttatggtcaagatgcaatggatggatcatatgatggtttaaaatatctatctgaaaatttgttgtctgaaggtacgacatcatacttggcaacgacaatgacgcaatcgactgataaaatagatgaagcacttataaatattgttaaatatgaggtggagcaagatgttcacaatgcagcggaaattgtaggtatacatctggaagggccatttatatctgaaaataaagttggtgctcaacatccgcaatacgttgtacgcccatttatcgataaaattaaacattttcaagagactgctaacggattaataaagattatgacgtttgcacctgaagttgaaggtgcaaaagaagcgcttgaaacgtataaagatgatattattttttcaattggtcatacagtggcaacatacgaagaagcagttgaagctgttgagcgaggagctaaacatgtcacgcatttatataatgcagcgacgccattccaacatagagaaccaggtgtttttggggcagcatggttgaatgatgctttacataccgaaatgattgttgatggcacacattctcatccggcatcggttgcaattgcttaccgtatgaaaggtaatgaacgtttttatttaattaccgatgcaatgcgtgcaaaaggtatgcctgaaggagaatatgatttgggtggccaaaaagtaacagttcaatcgcaacaagcacgtcttgcaaatggtgcgcttgctggtagtattttaaaaatgaatcatgggttacgtaacttaatatcatttacaggtgatacattagatcatttatggcgtgtaacaagtttaaatcaagccattgcattaggtatcgatgatagaaaaggtagtattaaagtaaataaggatgcagatcttgttattctagatgatgacatgaatgtaaaatctacaataaaacaaggtaaagttcacacatttagctaataattaatcataattaaatgtatgcaatagatttaatctgttaacataagcactttatattatgataaaatagaagcaataacatttttttctgggggtgtctaaatgggaaggcgataacatgtagttgtaatttaagtcatagtgataaatttgaatgcgtgttacccatgagtgacacatataacatggaggtgaatccctagaaatagggaattaattggaaacttcgaccataattagtttgattatatttattctattaattgcattaaccacagtatttgttggttcagaatttgcattagtaaaaattagagcaacaagaattgaacagctagcagatgaaggaaataaacctgctaaaatagtaaaaaagatgattgctaatctagattattatctttctgcttgtcagttaggtatcacagtaacatctttagggttaggttggcttggtgaaccaacgtttgaaaagctattacacccgatatttgaagcaatcaatttaccaactgcattaacgacgacgatttcgtttgcagtatcatttataatcgttacgtatttgcatgtagtacttggtgaattagcgcctaaatctatagcgattcaacatactgaaaagcttgctttagtatatgcaagaccattgttctatttcggtaacattatgaaaccattgatttggctgatgaatggttctgcacgtgttattattagaatgtttggtgtaaatcctgatgcccaaactgatgcaatgtcagaagaagaaatcaaaattattattaacaatagttataatggtggagaaatcaaccaaactgaattggcatatatgcaaaatatcttttcattcgatgaaagacatgcaaaagatattatggtacctagaactcaaatgattacactaaatgaaccttttaatgtagacgaattactagaaacaataaaagaacatcaatttacgcgttatccaattactgatgatggtgataaagaccatattaaaggatttattaacgttaaagagtttttaactgaatatgcttctggaaaaacaattaaaattgcaaactatatacatgagttgccaatgatttcagagacaacacgtatcagtgatgcattaattagaatgcaacgtgaacatgtacatatgagtctgattatagatgaatatggtggaacggcaggtattttaacgatggaagatattttagaagaaatcgttggggaaattcgtgatgaatttgatgatgatgaagtgaatgatatcgttaaaattgataataagacattccaagtaaatggtagagtactattggatgatttaactgaagagttcggtatagaatttgatgactctgaggatattgatacgataggtggatggttacaatctcgtaataccagcttacaaaaagatgattacgtggatacaacttatgatcgctgggttgtttcagaaatcgataaccaccaaattatttgggtaatgttaaactatgaatttaatgaagcgagacctactatcggacagactgatgaagatgaaaaatcagaatagatattaatatataaaccaactaagaatgatttaattcatttttggttggttatttttttgactaaaattaatgaaaagtgaaaatattacttgaactcaatatctttaatgatttaatgaatattttttattgaaagcgataattcgtattaattgagtttgttgaaaaaattagggtaatgtaaagatataaaagatacatagattggagagatataaagatgttgaatgagatacaaatattaaaaaatggatacccgatgccttcagttggattaggtgtttataaaatctctgacgaagatatgactaaagttgtaaatgctgcaattgacgcaggctatagagcgtttgatacagcatacttttatgataatgagacttcactaggacgagcattaaaggataatgacgtcgatagagaagatttgtttataacaacgaagttatggaatgactatcaaggttatgagaaaacattcgaatatttcaacaaatcgattgaaaatttacaaactgattatcttgatttatttctaatacattggccttgtgaagcagatggtctatttttagaaacatataaagctatggaagaactttacgagcaaggtaaggtaaaagcaataggtgtatgtaattttaatattcatcatctagaaaaattaatggctcaatcaagtatcaaaccaatggtgaatcaaattgaggtacatccatattttaaccaacaggaattacaagagttttgtgatcgtcacgatattaaagtgactgcatggatgcctttgatgagaaatagaggactactagacgaccctgtcattgttaaaattgctgaaaaatatcataaaacaccagcacaagttgtattgcgttggcatttagcacacaatagaattattattccaaaatctcagacacctaaacgcattcaagaaaatatagatattttagattttaatttagaattaacagaagtagctgaaattgatgctttaaatagaaatgcaagacaaggtaaaaatccagatgatgtgaaaattggggatttaaaataactggatgttaaattttacgtttatgaatgccttttaatgtgtacattaaaataaatgagttggtttttactatttgataaaacaatactcaggtacattcaaaatcttttaaataaaaaggatggacatagatgaaaattagagtcgtcattccttgttttaatgaaggggaagtcattacacaaacacatcaacaattaactgaaatactttcacaagatagtagtgtgaaaggctatgattataatatgcttttcatagatgatggtagtacggataccactatagatgaaatgcaacatcttgccacaatagatagacatgtcagctttatttcttttagtagaaattttggaaaagaagcagctatgattgcaggttaccagcatagtactgaatttgatgcagtcatcatgatagattgtgatttgcaacatccacctgaatatattccgaaaatggttgaaggttttatggaagggtatgatcaagtgattgcaaagcgtgatagaagtggtgaaaattttagtcgcaaaacattaagccatttgtactataagttagttaattgctttgtagaagaagtacaatttgatgatggtgttggtgattttagacttttaagtcaaagagctgttaagtccattgcatcacttgaagaatataatcgattttcaaaaggattatttgaatggataggatataatactaaagtgtttacgtatcaaaatgttgcgagacaaaaaggagaatctaagtggtcctttaaaaagttatttaattatggtattgatggattgatttcctttaatagtaaacctttgagaatgatgatatatcttggcttatttattttttcaataagcgtgttatatattatctatttattcatcaatattatgatttctggtgttaatattccaggatatttttcaacgattgcagctattttattattaggcggcatacagttaatttcaattggtgttgtaggtgaatatattggcaggatatattatgaagttaaggcacgtcctaaatatattattcaagctacaaatctttcaagtattgaaaatgatgagaaggatacccataaaatttactctaaataaacaaaaaaagaagccctcatcaatgagagcttctttttagtctttgcattttattttataaataaatcggattatgacgtaatgtctaatttgtgtaatgttacagtcatcgtagttcctacatctatatcactgcttacactgatttttgcgttattttgttgcgcgagttcattagctatatataagcctaatccagaaccacccgtttttgtattacgagagttttctactctgaatgttcgttcgaatatacgttcttgtagttctggtataatgccaataccttcatcgctaatagcaatgtcgatagtatcttgatctttattttcactaatattaatatcaatgcgactaccaacatttgaaaattttagcgcattatcaagtaagtttgttaaaatacgctcaagtggcgttcgatattgataaaatgcatcaatttcgctacagaaattcacttctaatgtacggttttcatgtttgatacgttgctcatatggttgcaatattgatacaagtaattggtctagttgtattaattctgggggatatgttttacctgtatttaaagtgataatatgagtcatatcatcaaataatgttgataatctgtttgcttgtttaattaatatgtcgtatgactctttaatctcatgatcctttgtgattataccatcacgtagtccttcagaatatgaaataatgcttgctaaaggtgtttttaaatcatgggctaagttttgaatcagttctgttttttcttgttgttcggatttaatttgattcatttgttgcgtaatttcagaagccattttattaaaagattgatttaattcataaatttcttttggtgaattaaacgttttatcattgcttgcgtaatttccgttagcaaattgcttagtttttatattaaactgcttaattttttgtataagtggattaataaaaatactacatattaataaggttaaacagcttgtaattattgtcgttaaggtcaaagttagtgtcatatggccattaaaccacattaaaatatatgcaattgctaaaatagttgaagttaatagtatactcgatacgacgccaataatgatttgacttctaattgataacaccattatcggctcctttcaaatttatatcctaatccccatacagttgtgatggtatatgttgtaaagctctctttttctaatttttctctaatacggtgtatatggacattcacggtattagcatcttcgtaatagtcatatccccaaactttttcaagtaattctgatttagaaataacttcattttctctagaagctaaataccacaataactcaaattccttaatacgcatagggacttcgtgaccatttacagtcacaactttacttaagttaataagtgttaattcatcaaacgacagttgttcaactggttgatgatggtatttcttcattcttgtaagtaaattattaatacgtaaaacgagttcccttggactaaatggttttttgacatagtcatctgcacctaaagttaaggcataaatggtatcatgttcttgtgttttggcagttaaatagataaaggggatatctaatttttgccttttcatttctttgacaatgtcgtaaccattaacttctggcatcatgatatcaagtaccatgatatcaatatcatttgatagtaaagaaattgcttctttaccgctagttgtcgttgttactttgtaaccttcatattcaaaataggtttgacaaatgtctacaatgtcttgttcatcatccacgatcagtaagtgggtcatctattttttcacctctgttcttacgacctctaaagtaattaatgatttctttaagtgaaatctgttttaacaatgagtgactcattagtaaaaggataaagaaagttaattgaagaggatacgtaaatatcatatctgctaagatataatttatcataacaaaggctccaaagaaactagcagcatatgcaaaaactccaaaaattaaacctaatccaattgcaatctctccgagtgggacaacaatatcaaataatgacgtcgtatgtgcaactatatttgcgaaaaaccacttataccactctggtgaatcagtattgttagcgatgactggtactaaacctttcagcgtaaatccgcccgttaatttttcatagccttgcattaacataacaatacctgaacccacacgaatgataaatgtaacgagtagcaataatttattcatgatgttcacattctttctatttattgtgtgtaatttatataaacataagattaagcaacataatgtgatttgtagtgttatgtgaacaggaagtgtttgagctcatgggttgcttaagctaaacaaacctcaagctctaaaaaaatttacttatgtgctctacaatcttatgggatttaatagttgtatatatattgaaaaaaggaaagtatgatttctacaagctaagggggctgtgaaatcatacgctttccattgagtaatgagtgtaatgtatattttaaaatttgtaatgtatagtaatagtatgttgtaaataaaagtttaactcagaaattgattattttaatttagcgccgccgaagatgacgtgagcttttttacaatagattgttacttcatcatatttgcttaaatctacatttttaagatcaaatgtttgtttttctttatcgtagtcaaccattgcgatttctttaccgtttttaatgtcgccattttttgttaggtagacgtataaatctggaccttttgatgatttgtagttagtaagcattaatttaccatttttaatctcagctttaccttcaacagtttcaccgtttttagaactgaatgtaccagttaggtgttttgttttatcagttttaacattgctatcttctgactttgttttttgttcagttttgttaccttgatcttgtgaattagaattaccacaagcgcctaaagttaatacagcggcagcagcaccaactgctaaaaaatattttgtattcatgctaacgcctcatttcttcaatttgataagttaagtttaaaataaaggcaaataatatgccattaactaattcttaacttcgtttaaatatcgcttaactaatattgaagaaagaataatttgaaaatgaaaataattgtctgatttaaataaataggagtcaaaataagaggagggcggttttttaagtgagaaaatatttatctaaactagttatcactataaaacacttctgatatatcgaactaagaatatcagaagtgttttatagttttgatattaaaatttataaaccttttgccacaataaaaacaacaagaaaataagatagacgattaaatacaagtaccaatatggtgttaaaaccatcataacgataaatgaaatgttaataatgataagtcctttaatcattagtttctttattttgttattattttcagcagtttcatctaagttattaaatgttgaaataaacaacataataccaccaatgatgaaaatggcaggggctaaaaatggaatagacatatatattgattgtgtacttgaaaagtcggtaacacgttgcgttaaactgacaacaatcgttaatatgatagcaataaatttttggtctgtaatgtatacaggttttaattttttatcaatgtaaaactgtagtatcgtccaaatgataaacatcgttatagtacacagagtaataaagttatatttatcaattatgaatgtatttataaaggcgtttatagttatagataacaacattgcacttaatgataaatgttgcatttgatgcctatataaattgaatccagttataagtacgacgatagcaatattaattaatatatatacaatcatgatggactcctgttcgttatacttcaatcaactattatatcaattaatatattgttattcattagatatgacttgtaaaaagtaaaataagttatcctttatacaccttttttattactccaaagtaatgtatgaagttgtggtaacacataaacgtgattcatatcattactttgcataactaaatccaccaactgctcgtagcgttctaacaacttttcggtatgattatctacgctgtctgataaatatgggttaccaacttgtaaatagaagggaatatctggataacggtggtgtatcattttggcaaaatcataatctttatcgtcgaatacaactacttttaagtttaatgaggaaggtacgcattgtgcaatcacttcatctaacttttttaaatcaggcgtcatagttgaacttggtggttttggactaatcgttaaatcatcaatttgtgtcatccaaggttggaatttactgccttgcgtctccagtgcgctgaaaatacctttatcttgaaataagtcaactaactcttggatacctttaattaatgctgggttaccaccagaaattgtaacgtggttaaataaatcgccaccaattcgttttaattcatcataaatttcttcagcggtcatgagttttatatcgcttttagcactaccatcccaagtaaatgcagaatcacaccagctacagcgataatcacatccagctgttctcacaaacatcgtttttctaccgattactcgaccttcaccctgaatggttggaccgaatatttcgagtacaggaattttagccattagttacacctgttcctttggtctaaatacgacataacttgttggtgtttctcttacaaatacttgaatacattttggttggtgttcgagcgatgccaaattttctttaacaatttgataaattgtttccgctacgatttcagttgaagggattttgtttttaaaagcaggtaagttatttaacagttgatggtcaaatttaccgtgtatcatctttttcaaatgactaaagttcactaaaaagccagtgtcatctagtttatcaccgacaattgttaaattaacaaagtaagtatgaccatggacattttgacaaatacctgcttcttcacacggaatgtgatgtgcagctgaaaaattaaaatctttatttaattcgaattgatatggatgcgttgtactaggatagatttgttgtaacaatttaaagcgctcctttactttcaagatattgatttagtccacgttgacgtaaatgacaagctggacattcaccacagccatccccaatgataccgttatagcatgttaatgtttttgtacgaatataatctaaaacttcgagttcatcacttaatttccacgtttctgctttgtttaaccacattaaaggagtatgaataacaaaatctttgtccatagctaggcttaatgttacgttcattgattttataaaactatcgcgacagtctgggtagcctgaaaagtctgtttcacatacgcctgtaataatatgcttagccccaatttgataagctagagcgcctgcaaacgacaagaaaagtaaatttctagctggaacaaatgtattaggtataccatcttcattattagtaatttccatatcatgttgtgttaatgcgtttggagtaagttgtgataataatgacatatctaaaacgtggtgtttcattccttgatcttgtgcaatttgttttgcgacttcaatttcagtatcatgtctttgtccataattaaacgttacgagttcaacttctttgaattgtttttttgcataaaagagacatgttgtactgtcttgaccaccactaaagacaacgatggctttttcattatttaatacactttccattttgtaattgctcctatcattaataatattaataaagaggttaatggcattgataagcccgtttttaatttataaaataaaaaaagcctatctccataaaagatagacgaaagaaatgggttgctcctataatatatattaaaggtttaccaacgaatgtttgaaatttcaatgtctagttttttatagagggtttcagctaggaacctctgatattcatttatgtacgatgaatagaatataccatatattagttaaaatcaaggtcaggataatgacaatgcctttaaagttttagctacatccaatacatattataaaaataaaacacatttagaacggagtatacaatgattctagtcatagataataatgattcatttacatataatttaatagactatattaagactcaaacgaaactaacagttcaagttgttggtattgataatctgctgatagaagacgtcattaatatgaagccaaaagcaattgttatttcaccagggccgggtaatcctgatgattatccaatcttgaatgaagtgttagaacaattttatcagcgtgtacctatactaggtgtatgtttaggatttcaatgtatcgtgtcttattttggtggaaatatcattcacggctatcatcctgtacacggacatactacacagttacgccataccaatgaaggtatttttcaaggactgcctcaaaatttcaatgtaatgcgttatcattcattaattgctgacggagcgacttttccaaattgcttaaaggttacagcaaaaaacgatgaagcgattattatggcatttgagcatattacatttccggtttttggtgtgcaatatcatcctgaatctattttgagtgaatacggttatcgacaggttgaattatttttatcgaaggtaggtgattattgtgagaatagaatataattatcgctactatctaactgaaaatgaatataagcaataccatattcaattaaagggatttataaagaagtatgttgccactaagttggctgatgtgggagaagtgatacactttgcacaagcgcagcaacgacaaggtagatatgtttcgttatatttaagttacgaagcggcaaagtattttaatcatgttatgtgtacacattcattagctaaagatgatatttatgcagtagcttatagttttaaaaaagcggaaaacataaattcaatatatgaacatcaaacttcttatgtatcaaaacatcatttttcatttgttgaatcttctgaggttatgatgactaatattaaacgtgtccaacaagcaattgttgaaggcgaaacgtatcaggtgaactatacggcgcgcttaacggataacatttattatcctattagtactttatatgaacgattaactcaatttagtaatggtaattatactgcgttattacaaactgatgaaatccaagtagcgtctatctcaccagaattattttttcaaaaaggacaatttaacaatgtcgataacgttatcataagcaaaccgatgaaagggacaatgcctagaggtaaaacggaagctgaagatcaacagtattataaaacattgcaaacttcttcgaaagatcgtgcagaaaatgtcatgattgttgatttactaagaaacgatatagggagaatatcacagagtggctcaattaaggtgtataaactatttttcattgaggcatataaaactgtatttcaaatgacttcgatggtaagtggaactttaaaaactaatacagacttaactcaaattttaacatcgttatttccttgtggttcgattacaggtgcaccgaaactgaatacaatgaaatatattaaacaattagaaagttcacctcgtggaatatactgcggagcaattggactattacttccaactgaagatgataaaatgatttttaatattccgattcgtactattgagtataaatatggacaagcgatttatggagtcggagcaggtattacaattgattctaagccaaaagatgaagtaaatgaattttacgcaaaaaccaagattttggagatgttataatgcaattatttgaaacaatgagaattgataatggacatatccctagacttacttatcatactaatcgcataaaatgttcttctgagcgattaaactttaaatttgatgaacatgcatggcgaaatgaattaaacgatgtaacaacaaagtatcacagtggccaatatagacttaaaatcgtattacatgctgaaagcgaatttgaaacgatagtgtcacctttacctgagaaaagtagttttacagcaaaatttcaagtgttgcccaaagcagttaatccaacttttataaataataaaacgacagaacgaaagcatttagcacacaatcatgaaacggatttaatattactaacctcagaggacggcaaggtccttgaatttgatattggcaacgttgtcattgaagaggatggaaaatggtacacaccaagttataaagatgatttcttaaaaggatgcatgcgtgattatttaatagatagtgacaaacttgttgaaaaagactttaataaaagcgaattgatttataaatatcataacaatgagatacgtttatttttgataaatagtttacgagaggttgccgatgtccacctttgcctttaaaattagtatgataataatgtagaaaatgaagtgaaaacaaatttaaaaattaaatggggccaaatatgattattgtttatattgtgctgttgttaattcttgtatacgtaaattatcgatttgtgaatcgattgctatctgaaaatagaatatatgttgttcgtttgatagcaacaattactactgttataagctttatcctagtatacgcattaattcgcgaactcatgccttttgttgtgcgagcaatggatttaatgtatcaccagtaaattaagtgagtaggtaaaatgaactattcaatcgattctataattaaaaatcaaagtaaagtaaagtaaccaaatattgaagaggtgtacaaatgaaaatatatagtcaaggtgaccaagccattgtagtcgcaattgaaaaagaagtatctaaaagtttaaccgaagatttattaacacttcgctcatatttaattgaacaaaattatccatttattatagaaattgtgccatcagaatcagacatgatgattgtctatgacgcaagggatatgattaaacaccataatatacaatcaccttttttatacatgaaagcactaatagaatcgattcatttaaacataaaacatgattttaaccagcaagatttgattgaaataccaattgtttatggttcgaaatatggtccagatttagaatcacttttaaaacattacaaaatcaagctagaaacatttattgaattacattctaaggcgcaatattttgtttcgatgatgggatattcacctgggtttccttatttaactggattaaataagaaattgtatattaatcacacgagtaaacagaaaaaattcattccggctggttctgtagtacttgaagggaaaaaatgcggtattgtaactacggatacaattaatgattggttagttattggttatacaccattatcactttttaatccgaaagaatcagatttcgcacgcttaaagttaggcgataatattaaatttagacctatcaatgaaaatgaattagaagtaggagcgtttaaagatgtcaatcataattgaaaaaagtggcttattcagtagctttcaggactttggtagaaggggatatgaacatgatggtgtaattccatgtggtgcacttgatactttagcacatgaaattgctaatcgattagttgcaaatgacaagaatgaagcaactttggaaatgactaataaaatggcgacgattcgttttacagaacctacactgattgcattagcaggaggtaatgtaaaagcttacactgagcatatgactatatctccatataaattgtatttgttagataaaggcgatgttttaaagtttagagaaacaagttatacatcgcgagtgtatttagctgtgggaggtggatttgaattagatgcatggttaggatctaattcaaccgactttaatgtaaaaataggtgggtttaaaggaagaacattacaagatggcgatgaaataaagcttaagagagattatacagctcgtcatcataagttatttgaaaaccttgctcacacgaaacaaacagattggggtattgatggatacgccttgtcatttaattatatgtctgatgtatttcatgtcgttaaaaataaaggtactgaagattttaaagaagatgccattcaaagatttgtgaaacatgattataaagtaacgagcaaagcaaatcgcatgggggtgatgcttgaaggtgaaaaaatcaaagctttttatgaagatatgccaccatatcagactgtcaaaaaaggaacgatacaaattaagcgtgatggcacacctattatcttattaaatgatcattatacgttaggtagctacccgcaaatcggtacaatcgcaagttatcatttaacgaaattagcacaaaaaccgcaaggatcacgtttgaaatttcaatttatagatattttaacggctgaaaagaacctcgttaagtatagtaactggttaaaccaattattccatggaatagaatatagaatgcaattagaaatgatgaaataatatttggtacgtagctcatactcgagtccgatgcaaataatttcctcctaatgtataatgaaataatactgtgttttatctgcgaaatgtatcatatattaattcgtttcacagtaaaatgaaaagataaagtgtgtttttacttgaattttgactaaaattactctatatttattaattgagctatgcttattattacaatttgattacaaattttaaatttgttaattgaatgataatattaaataaagagacttacacaagcaaatatgagttgtagcccaaaatacttgttaaatcaaagttgaaagctacaaataatgaaaattataaacttgaatctgaaagtaattactataattatgacaatgttaacttttaaacgcacttattaattaactacataatgttaatatctaatttattcaagtactttcgcaagatttattatctaaataacgggggaaagaatcatgagttcacaaaaaaagaaaattagtctttttgcgttcttcttattaaccgtaataacgattaccttgaagacgtatttttcttattatgttgatttttctttaggtgttaaaggtttagtacaaaacttaatattattgatgaatccttatagtttagtagcactggttttaagtgtgttcctattctttaaaggcaaaaaagcattttggttcatgttcataggcggcttcttattgacgttcctattatatgccaatgttgtgtactttagattcttctcggattttttaacgtttagtactttaaaccaagtaggtaacgtagaatctatgggtggtgcggttagtgcatcattcaaatggtatgactttgtttatttcattgatacgttagtttacttattcattttaatatttaaaacaaaatggttagacacaaaagcatttagtaagaaatttgttcctgtcgtaatggcggcttcagtagcattattcttcttaaacttagcttttgctgaaactgacagaccagaattattaacacgtacatttgaccataaatatttagtgaaatatttaggaccttataactttacagtttacgatggtgttaaaacaatcgaaaataatcaacaaaaagcgttagcatctgaagatgacttaacaaaagtattaaattatacgaaacaacgtcaaacagagcctaacccagaatattatggggtggcaaagaagaaaaatattattaagattcatttagaaagtttccaaaccttcttaattaataaaaaggttaatggtaaagaagtaacaccgtttttaaacaaattatcaagtgggaaagagcaattcacatacttccctaactttttccatcaaacaggtcaaggtaaaacatctgactctgaatttacaatggataacagtttatacggtttaccgcaaggttctgccttttcattaaaaggagataatacgtatcagtcattaccagcaattttagatcaaaagcaaggctacaaatctgatgtcatgcacggtgactataaaacattctggaacagagaccaagtatataaacactttggtatcgataaattctatgatgcaacatactatgacatgtcagataaaaacgttgtaaacttaggcttgaaagacaaaattttctttaaagattctgctaattatcaagctaagatgaaatcaccattctattctcatttaattacattgactaaccactatccattcacattagatgaaaaggatgcaactattgagaagtcaaacacaggtgatgcaacagttgatggttatattcaaacagcacgttatttagacgaagcattagaagaatatattaatgacttgaagaaaaaaggattatatgacaattcagtgattatgatttatggtgaccactatggtatctctgaaaaccataacaatgccatggaaaaactattaggtgaaaaaatcacaccagctaaatttacagatttaaacagaactggtttctggattaaaatccctggtaaatctggtggtatcaataatgaatatgctggtcaagtcgatgtaatgccaacaattttacatttggctggtatagatacgaagaactatttaatgttcggtactgatttattctctaaaggtcataatcaagtagttccattcagaaatggtgactttataacaaaagattataaatatgttaatggtaagatttattctaataaaaataatgaactcataactactcaaccagctgatttcgaaaagaataaaaagcaagttgaaaaggatctcgaaatgagtgacaacgtgcttaatggtgatttgtttagattctacaaaaatccagacttcaaaaaggtaaatccttcgaagtataaatatgaaacaggacctaaagcaaactctaaaaaataatatttaaacacgaactcggattgataaaatatcaatccgggtttttattatgttcttttatattattttttaaattatatgtgttgataaaaaggtatattataaagatcattagcatagtcatcaaagccttatcaagttttatttatagttgaagcaacaaaatattaaattatgacacttaacggtatcgatttcttttgatttcaaaaaggtgtataatgtatagaactgatttaagtacgtagagatttcaacagaagaaggaagatgggtatggaagcatataaaattgaacatttaaataaatcttatgccgataagactatattcgataacctagatttatcaatttcagaaggtgaaaaaataggtttggtaggcataaatggtacagggaaaagtacgttgttaaaagtaattggtggtattgatgatgattttacagccaatgttatgcatccaaatcaatatcgaattcgatattcgtctcagaaacaggaccttaatgaagatatgacagtttttgatgcagtattaagttctgatacaacaactttacgtatcatcaagcaatatgagcaggcagtacaagcttatgcggatgatcaaagtgataaattgttcaagcgaatgatggatgcgcaagatgctatggatcaacatgatgcttgggactataacgctgaaattaaaacaatcctctcaaaactaggtatacatgatactactaaatacattaaagaattatccggcggacaacaaaaacgtgttgtacttgctaaaacattaatagaacaaccagatttattgttattagatgaacctacgaaccatttagacttcgaatcaatcagctggttgatcaattatgtgaagcaatatcctcatacagttttattcgtaacccatgatcgatattttttaaatgaagtttccactagaattattgaactaaacagaggtaagttagcgtcatatcctggtaactatgaatcttatattgaaatgcgcgctgaaagagaagtaacacttcaaaagcaacaacaaaaacaacgagctttatataaggaagaacttgcttggatgagggctggcgctaaggctcgtactacaaagcaacaagctagaattaatcgatttaatgacctagaaaatgaagttaaccagcaatataaagacgataaaggtgaattgaatcttgcttattcaagattaggtaagcaagtgttcgaattagaagacttatcaaaggctattaatgataaagtattatttgaacatctgacggaaattattcaaaaaggtgagcgtattggtgttgttgggccaaatggagctggtaaaacaacactcttaaatattttgagtggagaagaccaacaattcgaaggtaaattgaagactgggcagacggttaaagtagcttattttaagcaaacagatgagaccctggatagagatattcgtatgattgattatttaagagaagaaagtgagatcgcaaaagaaaaagatggaacctcggtatctattacacaacttcttgaacgatttttatttccaagtgcaactcatggtaaaaaagtttataaattatctggaggagagcaaaagcgtttgtatttattacgtttactcgtacaccagccaaatgttctgttgttagatgaaccgacaaatgatttagatactgagactttaacaatacttgaagattatattcatactttcggtggtacagtgattaccgtaagccatgatcgttacttcttaaataaagttgcacagtcatattggtttattcatgatggtcagatggaaaagattatcggaacttttgaagattatgaaagttataaaaaatcattagataaaaataaatccacattgaagcaacaatctaaatcttctacaactgtacgtaagaaaaatggtttatcatataaagaaaaattagaatatgaacaattgatgaaacgcatagaacaagcggaagtaagaatggaagaaattgatgtgctcatgattgaggcaagtgcagattatgggaaaattaaagaattaaacgaagaaaaagaacaacttgaaattcaatatgatttagacatcacaagatggagtgagttagaagaaattaaagaacaacaataaggggtcaatttatgatgcaacaaacattatcgcattactttgggtatgaaacgtttcgaccaggacaagaagaaattattagcaaagtattagaccatcgtaatgtgcttggtgtcttaccaactggtggaggtaagtctatatgctatcaagtaccaggtttattgttaggtggtacaacaattgtaataagtccacttatatcattaatgaaagatcaagtggatcaattaaaagcgatgggaattcaagctgcttttttaaatagtagtttgactcaaaaagagcaacaacgtattgaaaaagcattatcaaatggagaaattcaatttttgtatgttgcaccagaacgatttgaaaaccgatattttttaaatatgcttcagcgtataaagattcatttagtcgcgtttgatgaagcgcattgtatatctaaatggggacatgatttcagaccgagttatcaaaacgtcatttctaaagtatttacattacctcaagattttacaataatagcgttgacagcaactgccacggttgaagtacagcaagatattagagaaaagttaaatatcgctcaaactgatcaaattaaaacgagtactaagcgtagaaatttaatttttaaagtaaatcctacttatcaacgtcaaaaatttatattagattatattaaaacacacgatgaagatgcaggtattatttattgttctacacgtaagcaagttgaagagcttcaagaagccttagaaagccagaaaattgaaagtgttatatatcatgcaggtttgagcaataaagaaagagaagaagcgcagaatgatttcttatttgatcgtgttaaagtagttgttgctacaaatgcttttggtatgggtattgataaatctaatgtacgttttgttatacattataatatgcctggagatttagaatcttattatcaagaagcgggacgtgcaggtcgtgacggattgaagagtgaatgtattttgttatttagcgaacgcgatatcaatttacacgagtattttataacagtctcacaagctgatgatgactataaagataaaatgggcgaaaagttaactaaaatgattcaatatacaaaaacaaaaaaatgtttagaagcaacaattgtccattattttgaaccgaatgaaaaattggaagaatgtgaacaatgtagtaattgtgttcaacaagataaatcatataatatgacacaagaagctaagatgattattagttgcatcgctcgtatgaaacaacaagagagttatagtgttatcattcaagtgttaagaggagagtcaacagattatattaagtataaaggttatgaccaaatttcaacccatggtttaatgaaaggttacacaacatcagaattaagtcacttaatagatgaattaagattcaaagggttcttaaatgaaaatgatgaaatattaatgtgtgatacttcaattaaaaaattactcagtaatgaagtagaagtattcacaacaccatttaagcaaaaagcgactgaaaaagtatttataaatacggttgaaggggttgaccgagcattattcagtcagttggtagaagttcgtaaaaagttaagtgacaaattaacaatagcacctgtaagtatattttctgattacacgttagaagaatttgctaaacgtaagcctgcttcgaaacaagatatgattaatattgatggcgtaggtagttacaaattaaaacattattgtccagcatttttagaaacgattcaaaattataaagccaaagtatagtgaaggcacctagtaaacattacttgttttactgggtgttttttgaattcaaagtaaaataacactatttcttaactggagattacctattattcattattttgttaaaaaagttcaaggataaatcatttaaatttgaaaattgtaataaacgtggttaaatagggaatacatacatataatctcggttttatgctatgagaaaaaaagaggtggcaaagtgattaagtttaaaaatgtaactaagcgttatggcaaacatgttgctgtcgataacattagtttcaatattaatgagggtgaattttttgtactaattggaccttcaggttgtggaaaaactacgaccttaaaaatgattaatcgactcattcacttaagtgaaggttatatttattttaaagataaaccaataagtgattatccagtatacgaaatgcgttgggatattggatacgtattgcagcagattgcattattcccacatatgacaatcaaagaaaatatagcacaagtgccacaaatgaaaaagtggaaagaaaaagatatagataaaagagtagatgaattacttgaaatggttggattagaacctgaaaaatataaaaacagaaaacctgatgaattgtcagggggacaacgacaacgtgtaggagttatacgtgcgttagcagctgatccaccagttattttaatggatgaaccgtttagtgcattagacccaatcagccgagaaaaacttcaagatgatttaattgaattacaaactaaaattaagaagacaatcatatttgttacacatgatattcaagaggcgatgaaacttggtgataagatttgtcttttgaatgaaggtcatattgaacaaattgatacaccagaaggatttaaaaataatcctcaaagtgaatttgttaaacaatttatgggtagtcatttagaagatgatgcgccatgtgttgaagagaacgcaattatccgtgacttgggtataatgaaaccaatcgatgaggttacatctatgagtgcttatccaattgtttatgacaatcaacaaattgaagtattgtatcaacatttatcagagagcgagcgtgtcattgtcatgcaagaagatagcgtaggtcaatatgttattgataggaaagatatcttcaaatatttgtcccagaaaaaggaggtagctcaacatgattaactttttcgacatattgagtgaacgtaaggggcaactattttcgacaatgatagaacatattcaaatatcatttatcgcattattgattgcaactgctattgcggtaccattaggtattttattgacgaagactaaaacgatatctgaaatcgtaatgaatattgcggcaattcttcaaaccataccatcgttggcattattaggtttaatgattcctttatttggtatcggtcgtgtgccagcaattattgcacttgtagtgtatgcgttgttaccaattttaaggaatacgtatactggaattaaagaagttgatccatcactcattgaagcggctaaaggtataggtatgaaaccatttagacgtttaactaaagttgaacttccgatagcaatgcctgttataatggctggtgtaagaacggctatggtattaattataggtacagcaacactagcagcattaattggtgcaggcggactaggtgatttaattttattaggtatagaccgtaacaatgcatcattgatattattaggtgcaattccagcagccttattggcaattatatttgatttaattttaagatttatggctaaattgtcatataaaaagttattgataacgttaggtgttatagtgatgattattatactggccatcgctattcctatgtttgcacaaaaaggtgataaaattacgttagctggaaagcttggctccgagccttcgattattacaaatatgtataaaattttaatagaagaagagaccaaaaatactgtagaagtgaaagatggtatgggcaaaacagcatttttatttaatgctttaaaatctgacgatatagatgtgtatttagagtttactggaacagttttaggtgaattaacaaaagaaccattgaagtcaaaagaagagaaaaaagtatatgatcaagctaagcaaagtcttgaaaagaaatatcaaatgacgatgttaaaaccaatgaaatataacaatacgtatgctttagctgtaaaacgtgattttgctaaacaacataatatacgtacaattggtgatttaaataaggttaaagatcaacttaaaccaggatttacattggaatttaatgttcgtccagatggttacaaagctgttcaaaaggcttataatttaaatttagataacatacgtacaatggaacctaagttgagatatcaagcgatcaataaaggtaatattaatttaatagatgcatattcaactgacgctgaattaaaacaatatgatatggttgtgttaaaagatgataagcacgtatttccaccatatcaaggagcgccattatttaaagaaagctttttaaagaaacatccagaaattaagaaaccgttaaacaaactagcaaacaaaatatctgatgaagatatgcaaatgatgaactataaagtaacagttaaaaatgaagacccatatacagttgcgaaagattatttaaaagcaaaagggttaatcaaataacgaccaacgccacataagatgaggggcacgccattatatcttatgtggcgttgctatatttaaatacatgcatatgttcaatttaagcatgcaataattattataaaatatgacatgtcaaatactatgtaagctagtaatatgtgaaaatagtagcattgcattttagaaacatagagcgatataatgaatataagttttttaaaatttcagttaattctaaggaggttgtttttattatgaaagaacaacttaatcaactatcagcatatcagcctggtttatctccaagggcattgaaagaaaagtatggcattgaaggagatttatataaacttgcatcaaatgaaaacttgtatggaccatcgcctaaagttaaagaagcgatatcagcacacttagatgagttatattattatcctgaaacaggatcaccgacattaaaagcggcgattagtaaacatttaaatgtagatcaatcacgcattttatttggtgcgggattagatgaagttatattaatgatttctagagcagtattaacgccaggggatactattgttacaagtgaagcgacattcggtcaatattatcacaatgcgattgttgaatcagctaatgtgatacaggtacctttaaaagatggtggcttcgacttagaaggtattttaaaagaagttaatgatgatacgtcattggtatggttatgtaatccaaataatcctacaggtacgtattttaatcatgagagcttagattcgtttttatctcaagtaccatcacatgttccggtactcatagatgaagcttattttgaatttgtgacagcagaggactacccggatacacttgctttgcaacaaaaatatgacaatgcattcttattacgtacattttcaaaggcgtatggattagcgggtttacgtgtaggatatgtggtagcaagtgaacatgcgattgaaaaatggaacatcattagaccaccatttaatgtgacacgtatatctgaatacgcagcagttgcagcacttgaagatcaacaatatttaaaagaggtaacacataaaaatagtgttgaacgcgaaagattttatcaattacctcaaagtgagcatttcttaccaagtcaaacgaattttatatttgtaaaaacaaagcgggtaaatgaactttatgaagcacttttaaatgtagggtgtattacgcgaccatttccaactggtgttagaattacaattggttttaaagaacaaaatgataaaatgttagaagttttatcaaactttaaatacgaatagaaaagggcgccacatggtatgaatatgtgccaaaatgcggtgtgaatgatgaggtgagagcattcagtgtaaaaagcaacaatagatgatattgttttgtatcaattgcttttttgctatactgaattaatactgatattttgaggagaagattaaaatgacccgtaaatcaatcgcgattgatatggatgaagtattggcagatacattaggagaaatcattgatgctgtcaattttagagcggatttaggtattaaaatggaagctttgaatggtcaaaaacttaaacatgttattcctgaacatgatggattaattacagaagtattgagagaaccaggcttcttcagacatcttaaagtgatgccgcatgcacaagaagttgtgaaaaaattaactgaacattatgatgtatatattgctacagcagcaatggatgtaccaacatcatttagtgataaatatgaatggttactagagttctttccatttttagatccacagcattttgttttttgtggtagaaaaaacatcgttaaagctgattatttaatagatgacaatcctagacagcttgaaatttttactggtacaccgattatgtttacagcagtgcataatattaatgatgatcgatttgaacgcgtaaatagctggaaagatgtagaacagtattttttagataatattgagaaagaaaaataaatcacttgaaccattttatgtagcaaataaaatgcatatactggggccccaacacagagaatttcgaaaagaaattctacaaacaatgcaagttggggtggggccccaacaaagaagctgacgaaaagtcagcttacaataatgtgcgagttggggtggggccccaacacagagaatttcgaaaagaaattctacaaacaatgcaagttggggtggggccccaacataaagaaatactttttctttagaaattagtatttcttatgggagtgggacagaaatgatattttctcaaaatttatttcgtcgtcccaccccggcaaggttgactagaattgaaaaaagcttgttacaagcgcattttcgttcagtcaactactgccaatataacttcgtagagcatagaacattgatttatgttccagcctgaatcctatttttaagtacacattagctgtgactaatgataaagaatcgctacataaatcattagtcgttctttatcatttccgtcccgctctcaataaatgtaagtctatctcattattataaatcggatgaatgtgttaatctatgtcagattacatgtcatccgattttttatagaatttgaaaaaggcgcataaaccactatgatttaaattacaacatcaatcattttagtggcatgcgccaaagttatatctctgtttttgaaaaaaggtaatagcttaaagctaataacagcgaatataatgtaagttgaatcttatgattacactttaaacctaatataatatcccattaagatcattccggatgcttacaaatcattgacagtaagtaactgaatggcatttggtataacctcaatatcaataggtgtttctaatgaaatttcgccatcaatatcaactttcattgctggatctgttgtaagtgaaatctttttaccaggtatatgctcaataccttgagtaatttcattccaattcatgctatcacgctttttaaaaatatcatttaaaatactgaaactttgttcattaaaaatgaaagtgttcagttcaccatcttgaggagacaaatcagtcaatggtatacgactaccaccaatgaatggaccatttgctgatagtatcatggtcgtttcgccagaatatgtcttatcatcaattgttaattgataattaaattgtgttggatttagcagtgttttgacagttgatccaatataactcaatttaccaaatatatcttttgaaccatcttgtacgttttcagcgttttgaacaattagacctaagccaacaaagttgagtgcatattgattatttattttaattacatcgtatgtaccaacttgtgcagaaatcatttgttcactagcttgtttatgattaggtgctatatttagcgtttttgtaaaatcattaaaagtaccgcctggtaaaattccaatagggagttgaaggtcatgtgtcataacaccatttataagttcgttaaccgtgccatcaccgccaagaataaataatatatctacatcttttgcatagtttttagttttgatttcttggcaatatttaataatgtcaccttcgttttcactcaattgaatagaaagatgcttacaaattgaacttaatgctgttgtaacttccccaataccttgattaatattttttaatccactgtgttcatggtaaaagaggacaccatgtgtatatttattttccatagcttagcctactttctaaaaattggttcattaaatatatatacccacttttaattgttaatacccaaaatatgtttttaaatagagaaaatgataataactgacattgatgtctatagagtggggcgagaaaatatagttatagttgtctataacgagcatattaagtttttatttatattgatatcttgaatttaattaatagaaacctataaaaaaacagtaagccatttaaatgacttactgttttttgaattaggccaacaatattaacgtatacctttcatcgctttgatgattaaaggtgagaatgctaatacaattgttgtaacaataattgcaacaacacctaggaaaataaagtaatttgtttgacctagtggttctattaacttaactaaagtaccattgattgcttgtgcagatgcgttagttaaataccaaatactcatcatttgagcattgaatgctttaggtgctaacttaacagcagcactattacctgttggtgataagcaaagctcaccgataacacaaataatgtacgataaaataacccagttaactgagaagtttgatgtacctgatgcataacctacaataccaattagtatgtatgacgcacctgctaagaacgtaccaattgcaaattttactggcagactaggttgtttagttccaagcttttgccataaaagtgaaataattggtgctaataataaaataaataatgggttaattgattggaaaatcgcttcaccaaagtttgttttccaaccaaataagtttaatttcatatctgaatgttcaataccataaatgtttaatacattagaaccttgttcttgaatagcccagaacaccattccaagaatgaataatggaataaatgctttaacacgagaacgttcagtatcagtgacatctttacttctaataattaaagtgaagtaaatgattggtaatgcaatacctaatactaaaacagtattactaactaagttaaatgataatgagttagttaatgcaccaattacaataattaatacaattgctaacacaacacttccgatgataagaccatattttttcttttctgctggagtcaatggattagtaggtttcatacccacactacctaagtttttacgattgaaaagtacataccaaactaaacctagcgccataccaacagctgcaattaagaatccgccatggaagtttttaacattaacaaagtgttgcaaaataataggtgataataatgcacccatattaactgacatatagaaaataacaaaacctgcatccatacgtctatcattttcaggatataagcggccaacaatatttgaaatatttggcttcattaaacctgaaccaataataatgaagaacattgatgtgaataagccgattaacgcaaacggtaagcttaaacaaatatgtccgataataataaagactgcacctagtaaagtagcgcctctagtgcctgtaattctgtcagcaatccatccacctggtattgatgtcatatagattaatgaaccgtaaactgacatgattgacatagctgttgttttatcaattccaaggccattatctgttacggcgaagtacatgtagaaaatgagtagggcacgcatgccataataactaaacctttcccagaactctacaaaaaatagtacgcctagtcctctaggatgcccgaaaaatcctgtttgaggtatgtcttgaatttgatttccatgggagttttgttgtgtcatatatacatcccatcctttcttcccctaatacaatagtttaattaaatttgattgtgccttatcaactaaatacctcattaaatcacaaaaaaatagaaatattgagaatattctgttattaagtgcgcacaattaattagagataatataaaaatatacttattgacgttaaagtgcaatagatttctataaaaatgttgtttatttcgtgtactaatattcttttggtgtactttggggtaaaatgttattttaatgtaacctattatgtatgctaaatgaaaaacacaccgataatgtaggaaaacctacttattggtgtgtttattgaatgatacatttaacggttatctattttttcgggatataaatcatgattcattaaacgatgctcagccattttttcatatttagaatttggacgtccatagtttgtataaggatcaatagaaattccaccacgtggtgtgaacttgccccaaacttcaatataatgtgggtccataagctctatcaagtcattcataatgatattcatacaatcttcgtggaaatcaccgtgatttctgaaactaaacaagtataatttcaaagattttgattcgaccattttaacatttggaatatatgaaatatagatagttgcaaaatctggttgcccagtaatcggacataatgatgtgaattctggacagttgaattttacgaaatagtcacgaccttgatgtttattatcaaacgattctaatacatcaggacgatagtcaaaattgtaagtattgtcttgatttcctaataaagttatatcttgtaattcatcttgttgacggccatgtgccatataaagcgctcctttaaatttatttttttattattttggcgtctcggcgtgctttttcaaacatgtaataacttgcaccgataataacgacgtaacctaatgttgcatagaaatctggagattctccgaatagaataaatccaagtattgctgtgaaaattatagatgcatacgtgaaaatagaaatatcttttgctgctgcaaaactatatgctaatgtaacaccaatttgacccacagcggcagctaagccagcccctaatagataaagtatttgcatctgactcattggttcataagtatatgcagtgaaaggtattaaaacgatgacagaaaataaggagaagtaaaatactatagtatatggtgcttctcttgtactaagtgctcgaacacatgtatatgctgatgctgcaaaaatacctgagaataagccagctaatgatggaatcatagatgatgaaaattcaggtttcactattaaaagcatacctaaaatagcaattatcatcgctgttatttgatacttccttactttttcatgtaagaaaacaatgcttaataaaatcgtccagaaaggattgagtttcattaatgaatcggcatcactaagtaccatatgatcaatggcataaatatttaacaatacaccgataagtccaagtgttgatcttgttattaataagggttgacttgaaagtctgccaaacattggctgatggtatttatatataaaaaataatggaataaacattgctactaagtttcgtgctaatgatttttgaaaaacaggaaggtcacctgcaagtctgaaaaacactgacataaaactgaaaccaatagccgaaattaaaatggcaatgataccttttactttaggattcaattttatcgcctcttttatataaaattaacgtatttatattagcataaaacaacatgttgtgcataaatagttgaaatttactataaaaagactataatagactgtaccgaacaaacgttctgtgtttatttgtcggaataatagggcattacacttttatgaatgtttgtgttattacttaaaacaaatatcaattcagtatcaagctaataagctttttcttgatttctgttgatacaattgagattgacacagattttaaaaaatcaagtgatatctactgaaaaaatttttttaatttgttcaagtttttctaattaagtattggtgcctagttggaacgttttacgaacattcgattagaaaatgacactttaaatcatagtgtgtcttatgtataatgaaacacataatatagtgttggttaaacgaaaaagacacaatatcttgtgttttgtatgcaaatgctttatttatgaagaaattacatttaaaagtaatttaacacagaaatttaatagttattatcaatgaatagtcatattttttagaaaatgtactgagcaaatggaaggtatctaatgatctaaacactacatatagtgatttttatacattcaacccatataagctactattttctcaaatataaatctatgcaattggtttacatttgagaaaataagtagcttcattatagttaatacaatgctgagataaccatagtagcgacgttgttaaagcattttttaattgtaatgactacttaatttaaaagggttgaagaaagaaggtgatccaatgaaaataatatatttttcatttactggaaatgtccgtcgtttcattaagagaacagaacttgaaaatacgcttgagattacagcagaaaattgtatggaaccagttcatgaaccgtttattatcgttactggcactattggatttggagaagtaccagaacccgttcaatcttttttagaagttaatcatcaatacatcagaggtgtggcagctagcggtaatcgaaattggggactaaatttcgcaaaagcgggtcgcacgatatcagaagagtataatgtccctttattaatgaagtttgagttacatggaaaaaacaaagacgttattgaatttaagaacaaggtgggtaattttaatgaaaaccatggaagagaaaaagtacaatcatattgaattaaataatgaggtcactaaacgaagagaagatggattctttagtttagaaaaagaccaagaagctttagtagcttatttagaagaagtaaaagacaaaacaatcttcttcgacactgaaatcgagcgtttacgttacttagtagacaacgatttttatttcaatgtgtttgatatttatagtgaagcggatctaattgaaatcactgattatgcaaaatcaattccgtttaattttgcaagttatatgtcagctagtaaatttttcaaagattacgctttgaaaacaaatgataaaagtcaatacttagaagactataatcaacacgttgccattgttgctttatacctagcaaatggtaataaagcacaagctaaacaatttatttctgctatggttgaacaaagatatcaaccagcgacaccaacatttttaaacgcaggccgtgcgcgtcgtggtgagctagtgtcatgtttcttattagaagtggatgacagcttaaattcaattaactttattgattcaactgcaaaacaattaagtaaaattggaggcggcgttgcaattaacttatctaaattgcgtgcacgtggtgaagcaattaaaggaattaaaggcgtagcgaaaggcgttttacctattgctaagtcacttgaaggtggctttagctatgcagatcaacttggtcaacgccctggtgctggtgcagtgtacttaaatatcttccattatgatgtagaagaatttttagatactaaaaaagtaaatgcggatgaagatttacgtttatctacaatatcaactggtttaattgttccatctaaattcttcgatttagctaaagaaggtaaggacttttatatgtttgcacctcatacagttaaagaagaatatggtgtgacattagacgatatcgatttagaaaaatattatgatgacatggttgcaaacccaaatgttgagaaaaagaaaaagaatgcgcgtgaaatgttgaatttaattgcgcaaacacaattacaatcaggttatccatatttaatgtttaaagataatgctaacagagtgcatccgaattcaaatattggacaaattaaaatgagtaacttatgtactgaaattttccaattacaagaaacttcaattattaacgactatggtattgaagacgaaattaaacgtgatatttcttgtaacttaggttcattaaacattgttaatgtaatggaaagcggaaaatttagagattcagttcactctggtatggacgcattaactgttgtaagtgatgtagcaaatattcaaaatgcaccaggtgttagaaaagctaacagtgaattacattcagttggtcttggtgtgatgaatttacatggttacttagctaaaaataaaattggttatgagtcagaagaagcaaaagattttgcaaatatcttctttatgatgatgaatttctactcaatcgagcgttcaatggaaatcgctaaagaacgtggtatcaaatatcaagactttgaaaaatctgattatgctaatggcaaatatttcgagttctatacaactcaagaatttgaacctcaattcgaaaaagttcgtgaattattcgatggtatggctattcctacttctgaggattggaagaaactacaacaagatgttgaacaatatggtttatatcatgcatatagattagctattgctccaacacaaagtatttcttatgttcaaaatgctacaagttctgtaatgccaatcgttgatcaaattgaacgtcgtacttatggtaatgcggaaacattttaccctatgccattcttatcaccacaaacaatgtggtactacaaatcagcattcaatactgatcagatgaaattaatcgatttaatagcgacaattcaaacgcatattgaccaaggtatctcaacgatactttatgttaattctgaaatttctacacgtgagttagcaagattatatgtatatgcgcactataaaggattaaaatcactttactatactagaaataaattattaagtgtagaagaatgtacaagttgttctatctaacaattaaatgttgaaaatgacaaacagctaatcatctggtctgaaatagcagatgattagactgctatgtctgtatttgtcaattattgagtaacattacaggaggaaattatattcatgatagctgttaattggaacacacaagaagatatgacgaatatgttttggagacaaaatatatctcaaatgtgggttgaaacagaatttaaagtatcaaaagacattgcaagttggaagactttatctgaagctgaacaagacacatttaaaaaagcattagctggtttaacaggcttagatacacatcaagcagacgatggtatgcctttagttatgctacatacgactgacttaagaaaaaaagcagtttattcatttatggcgatgatggagcaaatacatgcgaaaagttattcgcatattttcacaacgctattaccatctagtgaaacaaactatttattagatgtatgggttttagaagaaccacatttaaaatataaatcagataaaattgttgctaattaccacaaactctgggggaaagaagcatcaatttatgaccaatatatggccagagttacgagtgtatttttagaaacattcttattcttctcaggtttctattatccactatatctagctggtcaaggaaaaatgacgacatcaggtgaaatcattcgtaaaattcttttagatgaatctattcatggtgtatttaccggtttagatgcacagcatttacgaaatgaactttctgaaagtgagaagcaaaaagcagaccaagaaatgtataaattgctaaatgacttgtatttaaatgaagagtcatatacaaaaatgttatacgatgatcttggaatcactgaagatgtgttaaactatgttaaatataatggaaataaagcactttcaaacttaggctttgaaccttattttgaggaacgtgaatttaacccaatcattgagaatgccttagatacaacaactaaaaaccatgacttcttctctgtaaaaggtgatggttatgtattagcattaaacgtagaagcattacaagatgatgactttgtatttgacaacaaataacaattaaattaaaagaccttcacatgtgaagggaaatagcgattcgtttcgtcttgtttcctacatgttggaggtcttttttctatacttaaaatcgtatgcacattttgaaaaagtaaaaattgcatttaataatgccgatgaagctagaaagtatacaagatatagcattacaaaagggtgtgctattttaccatatacttctatattacacatttacaaaaaatgatttctattttaattgcaaatatcaataaaattgacaataaattatttgaaaggctattgaaatgagtgacaaaaaacgataccattaatgagaaatgttatcaatgataataattatcattaaattaaagggagaaaattttgtaatgaagtatttattaaagggaaaaattttgcttctattacttatattgctaacaatcatttcgttgtttataggtgtcagtgaactgtctattaaagatatctttcatttatcagactcacagcaaaatatattgttctcaagtcgaataccaagaacaatgagtattttaattgctggaagttcattagctttagctggcctaatcatgcaacaaatgatgcaaaataagtttgttagtccaactacagctgggacgatggagtgggcaaaattaggtatcttaattgccttattattctttccaactggtcatattttattaaaactagtatttgctgttatttgcagcatcagcggaacatttttatttgttaaaattattgattttatcaaagtgaaagatgtcatctttgtaccactattagggattatgatgggtggcattgtcgctagttttacaacgtttatttcattacgtacgaacgccgtacaaagcattggtaactggcttaacgggaactttgccattatcacaagtggacgttatgaaattttatatttaagtattcctcttttagcattgacatatctttttgcgaatcatttcacaattgtaggaatgggtaaagactttaccaataatttaggtttgagttatgaaaaattaataaatgttgctctatttattactgccacaattacggcattagtcgtcgtgacagttggaactttaccattcttaggtttagttattccaaatattatttcgatttatagaggcgatcatttgaaaaatgcaattcctcatacaatgatgttaggtgcaatatttgtactgttttcagatattgtaggtagagtcatcgtttatccttatgaaataaacattggcttaacgattggtgtgtttggaacaatcattttccttatcttactaatgaaaggtaggaaaaattatgcgcaacaataataaaaaaataatgcttttaattgcagtaacgttattaattagtatgctgtacttatttgtaggtattgattttgaaatatttgaatatcaattttcaagtcgtttaagaaagttcatattaattattttagtaggtgctgcaattgcaacatccgttgttattttccaatcaattacaaataatagattgttaacgccatcaataatgggcttagatgcagtttatttatttatcaaagtaataccagtcttcttatttggtatacagtcagtttgggttacaaatgtatatttaaatttcatactaacacttgtaacgatggtattattcgcattattactattccaagtgatttttaaaattggacagttttcaatctactttatcttacttattggtgtccttttaggaacatttttcagaagtatcactggatttatccagttgattatggatccagagtcatttttagcaatacaaagtagtatgtttgcaaattttaatgcttctaattcaaatttagttactttttcagctgttatattagttactttattaatcattacaatttatttagtaccatatttagatgtattacttttaggacgcgctgaagcaattaatcttggtatatcatatgaacaattaacacgctttttgcttgtgattgtatctatattggtatcgatttcaactactttagtgggaccaattacatttttagggttattaacggttaacttagcacatgaattaatgaagacttatgagcataaatacattttgattgctacgatttgtttaagttggattagtttatttagtgcacaatgggtagttgaaaatgtgtttgaagctacaacagaaatgagcatactgattgatttgataggtggaagttacttcatttatctattagttaaaaggagaaatgcgcagtgattcaagttggaaatttaactaaaactatacataatcaaaccatattagaagatataagtatagttatagaaaaaggtaaattgacgtcattaattggaccaaatggtgcagggaaaagtacattactttcagcgatatgtcgcttaattcgatttgatgaaggtgaagtaaaaatagatggacagcttatgtctgattataaaaacaatgatttgtcgaaaaagatatcgattttaaagcaaacgaaccatacagaaatgaatattactgtagaacaattagttaatttcggacgatttccatattctaaaggacgtttaacgaaagaagaccatgaaattgttaatgatgctttagatttgttgcaattacaagatattagacatcgtaatataaaatcattgtctggcggacaacgtcaacgtgcctatatagcgatgaccattgcacaagatactgaatatattcttttagatgaaccgttaaataatctagatatgaagcacgctgttcaaattatgcaaacattgcagatgttggcacataaaatgaataaagcgattgtgatcgtgttacatgatattaattttgcatcatgctattcagatcaaattgttgccttgaaaaacggtcgattagttaaatcagatttgaaagataatgtcattcaaagcaacgttctaagcgatttatatgatatggatattcaaattgaacatattagaaatcaaagaatttgtttatattttaaggattgataatttggagacactttaaaggggtgatgcgccaattaaagaagggttaacaagtatttattcgtatttcacatcaagcacacagattaagccaaaagaggagaagtttatattatgaagaaaactgtcttatatttagtagtagcattaatgtttgtattagcagcttgcggtaacaattctgagaaagaacaatcaaaatcagaaactaaaggttcaaaagaaacggttaaaattgaaaataactacaaaatgcgtggcgagaagaaagatggtagtgatgctaaaaaagttaaagaaacggttgaagtaccaaagaatcctaaaaacgcagttgtgttagactatggcgcattagatgtaatgaaagaaatgggcttatcagacaaagtaaaagcattacctaaaggggaaggcggcaagtcattaccgaatttcttagagtcatttaaagatgacaagtatacaaatgttggtaacttgaaagaagttaatttcgataaaattgcagcaacaaaaccggaagtaatctttatctctggccgtacagcaaatcaaaagaatttagatgaatttaaaaaagctgcaccaaaagcaaaaattgtttacgttggtgcagatgaaaagaatttaattagttcaatgaaacaaaacactgaaaatatcggtaaaatttacgataaagaagataaagctaaagaattaaataaagatttagataacaaaattgcttcaatgaaagataaaactaagaagttcaacaaatcagttatgtatttattagttaatgaaggtgaattatctacttatggacctaaaggtcgtttcggtggattagtttacgatacattaggtttcaacgcggttgataaaaaagtaagcaacagtaaccacggacaaaatgtctctaatgaatacattaataaagaaaatccagatgtcattttagcaatggatagaggacaggctgtaagtggtaaatcaactgcgaaacaagcattaaataatcctgtattaaaaaatgttaaagcaattaaagaagacaaagtttataatttagatcctaaattatggtactttgcagctggatcaactacaactacaattaaacaaattgatgaacttgaaaaagttgtaaaataattttaaaagaggggaacaatggttaaaggtcttaatcattgttcccctctttactttaaaaaaggaaatctgggacgtcaatcaatgtcctagactctaaaatgtactgttgtttgtcgttggttgaatgaacatgtacttgtaacaagttcatttcaataccagtgggatccaaacatagagaaatttgatttccaatttctactgacaatgcaagttgacggagcccaaacatagagaatatcaaaaagaaattctacagaagtggtgctttatcatgtctatcccactccctataattttttggctatgttgtttaaatttcaaaataaatatgatagtgatacttacagcgattgttaaacctagattggcaatttggacaacgctcaaccatcatatattcattgattgttaattcgtgtttgcatacaccgcataagattgctttttcattaaatgaaggctcagaccaacgcttaatggcgtgcttttcaaactcattatggcacttatagcatggatagtatttattacaacatttaaatttaatagcaataatatcttcttcggtaaaataatggcgacagcgtgtttcagtatcgattaatgaaccataaactttaggcatagacaaagctccttaacttacgattcctttggatgttcaccgataatgcgaacttcacgatttaattcaatgccaaatttttctttgacggtcttttgtacataatgaataaggttttcataatctgtagcagttccattgtctacatttaccataaaaccggcgtgtttagttgaaacttcaacgccgccaatacggtgaccttgtaaattagaatcttgtatcaatttacctgcaaaatgaccaggcggtctttggaatacactaccacatgaaggatactctaaaggttgtttagattctctacgttctgttaaatcatccattttagcttgtatttcagtcagtttaccaggagctaaagtaaatgcagcttctaatacaactaagtgttctttttgaataatgctattacgataatctaactctaattcttttgttgtaagtttaattaacgagccttgttcgtttacgcaaagcgcatagtctatacaatctttaacttcgccaccataagcgccagcattcatatacactgcaccaccaattgaacctggaataccacatgcaaattcaaggccagtaagtgcgtaatcacgagcaacacgtgagacatcaataattgcagcgccgctaccggctataattgcatcatcagatacttctatatgatctagtgataataaactaattacaatgccacgaataccaccttcacggataataatatttgagccattgcctaaatatgtaacaggaatctcattttgataggcatatttaacaactgcttgtacttcttcatttttagtaggggtaatataaaagtcggcattaccacctgtcttagtataagtgtatcgttttaaaggttcatcaactttaatttttttatttgggataagttgttgtaaagcttgatagatgtctttatttatcacttctcagtacatcctttctcatgtctttaatatcatatagtattataccaattttaaaattcatttgcgaaaattgaaaagaaagtattagaattagtataattgtaaaatacggcactattgtcgttataagtattttttacatagtttttcaaagtattgttgcttttgcatctcatattgtctaattgtaaagctatgttgcaatatttgatgctttttagtattgaattgtaaagcgatctcatcattagtcgataagagacgatcaagtgcaagataagattcaaatgtttgggtattcatttgaatgatatgtagacgcacctgttgttttagttcatgaaaattgttaaacttcgccatcataacctttttattatatttatgatgcaaacgataaaaccctacataatttaagcgtttttcatctaaggatgtaatatcatgcaaattttctacacctactaaaatatctaaaattggctctgttgaatatttaaaatgatgcgtaccaccaatatgttttgtatattttactgggctgtctaagaggttgaataataatgattcaatttcagtgtattgtgattgaaaacaattagttaaatcactattaatgaatggttgaacatttgaatacatgataaactcctttgatattgaaaattaatttaatcacgataaagtctggaatactataacataattcattttcataataaacatgtttttgtataatgaatctgttaaggagtgcaatcatgaaaaaaattgttattatcgctgttttagcgattttatttgtagtaataagtgcttgtggtaataaagaaaaagaggcacaacatcaatttactaagcaatttaaagatgttgagcaaaaacaaaaagaattacaacatgtcatggataatatacatttgaaagaaattgatcatctaagtaaaactgatacaactgataaaaatagtaaagaatttaaggcattacaagaagatgttaaaaatcatctcatacctaaatttgaagcatattataagtcagcaaaaaatttgcctgatgatacaatgaaagttaagaaattaaaaaaagaatatatgacgcttgcaaatgagaagaaggatacgatatatcaattaaaaaaattcatagatttatgtaatcaatctatcaagtataacgaagacattttagattatacgaaacaatttgaaaaaaatagatacaaagttgaatcagaaattaaattagctgataataaaagtgaagcaacaaatcttcgacaaaattagaacataataataaaacgttaagagatactgcgaagaagaacctagatgatagtaaagaaaatgaagtaaaaggcgcgattaaaaatcacattatgccaatgattgaaaaacaaattaccgatattaaccaaactaatattagtgataagcatgttaataatgcaaggaaaaacgcaatagaaatgtattacagtctgcagaactattataatacacgtattgaaacaataaaggttagtgagaagttatcaaaagtcgatgtagataagttgccgaaaaagggtatagatataactcacggcgataaagcctttgaaaaaaagcttgaaaaattagaagaaaaataactataatcatttttcaaagttaaaaattttgaatttatggttaacatgtcaacttactatgtgtataatggtaaacattgatattaactatatgtataaaaatgtcacgcagatgctatttaaatgtgataaatatttttagaggtgaatagagtggctataaagctaagttcaattgaccaatttgaacaggttattgaggaaaataaatatgtttttgtattaaaacatagtgaaacttgtccaatatcggcaaatgcgtacgatcaatttaataaatttttatatgaacgcgatatggacggttattatttgattgtccaacaagaacgcgatttgtcagattatattgctaaaaaaacgaacgttaaacatgaatcacctcaagcattttattttgtaaatggtgaaatggtttggaatcgagaccacggtgatattaatgtgtcgtcattagcacaagcagaagaataatgaaactatagggttggaacattttgccttacactactagacgtgaatagcacaacttaaattcgtgtgaatcagagtagtttggctataatgatgttctgaccttttattttatgtaacctttagaagcagttaagttagtacttttttacaaacatatgtataatgtattcgagtatttttattgaaaatattttggaaaacgacgaatccaataagaaaatttaaacatgatttgtaagttagtttaatagcaaatatatgctaaaccagaagaagtatactgttatttactggaataattaataatcatgtcatgttaaatgttcgcatataatcacgagataaaatctgaaatttaagattaatcttttatgaataaaaaacgtatcacaacaaataataaagtaaggtggtcaaggttatgaaagtattagtagccatggatgagtttcatggaattatttcgagttatcaagctaatagatatgttgaagaggcagttgcaagccaaattgaaactgcagatgtagttcaagtaccattgtttaatggaagacatgaattattagattctgtatttttatggcaatctgggcaaaagtaccgtataccagtacatgatgcagatatgaatgaagttgaaggtgtttacggacaaactgatacagggatgaccgttattgaggggaatttatttttaaaaggtaaaaaaccaattgttgaacgaacaagttatggtttaggagaaatgattaaacatgcattagataacgacgcaaaacatgttgtaatttcactaggtgggattgatagttttgatgctggtgcaggtatgttacaagcattaggtgctcaattctatgatgacgaagggcgtgtcgtagatatgagacaaggtgctggtgtaattaaatatattcgtcgtatggatatgtcgaacttacaccctaaaatggaaacagcaagaattcaagtaatgtcggatttttcaagtcgattatatggtaagcaaagtgaaatcatgcaaacttatgatgcgtatcagttgaatcataatcaagcagcagaaatcgataatttaatttggtattttagtgagttatttaaaagtgaattgaaaattgcaattggtccagttgaacgtggtggtgctggtggtggaattgcagcagtcttgaatggactgtatcaagctgaaatattaaccagtcatgcattagtagaccaactaacacatttagaaaatttagttgaacaagcggatttaattatttttggagaaggattaaatgaaaatgatcagttgctagaaacgacaacattgcgtattgcagaactttgtcataaacatcaaaaggttgccattgcaatttgtgcaactgctgaaaagtttgatttatttgaatcacaaggggttacagcaatgtttaatacctttatcgatatgccggaaagttatactgactttaaaatgggattacaaattaggcattatactgttcagtctttaaaactgttgaaaacacattttaatgttgaggtttagtaaagaaggactaaattggtgatgctgtcatgatgtttaagaacatgtatgatggttagaaaaacaaattagaagatcgaaagtatacttaaaataaaataacatgaaaaaatcacgctatcattgcactgaatattagcgtgattttttatattaattaagcctgagttgaacgagtatataatcgtttgtttttagttattttcagcgatatcttctacaattccgatgattacttgcactgctttttccatgacatcaatggatgcatattcatatgggccgtggaagttaccgcaacctgtaaagatgtttggagttggcaaccccatatatgacaattgtgaaccatctgtaccaccacgaataggttcagtgtttgctggaatatctaatttagcaaagacacgtttaggtatatcaataatatgaggcaatggtaatattttttctgccatattgaaatattgatccgatatatcaactttaactggataattttcaaaatgggcattgatatcgtcacgtatttctaaaatacgtttcttacgcaattcgaattgttttttatcatgatcacgaataatgtattgcaaagttgctttttcaacagttccttcaaagttcattaagtgataaaagccttcatatccttctgtgcgctccggaacttcactatcaggtagcaaactatcgaattgttcacctaaacgtattgcgtttaccattgcatttttagctgaaccaggatgaacattcacaccatggcatgtaataaccgcttcagcagcgttaaagctttcatattgtaattctccatattgactaccatccatagtataagcaaaatcggcattgaagcggtcaacatcaaatttatgtggaccacgaccgatttcttcgtctggtgtaaatccaatgcgaatggtaccatgtttaatttctggatgttcttgtaaataacaaatagcttccataatttccacaatacccgctttatcgtctgcacctagtaacgatgtaccatcagttaccattaatgtatgaccaactaaactattaagttctggaaatactttaggatctaagaaacgtttagtattgcctagtttgtatggcttaccatcatagttttcaataatttgcggtttaacatttgaagcattgaaatcaggtgatgtatcaacatgcgccaaaaaaccaacagttgggacgtcgacatcgatgttactttctaatgtagcaaataagtagccattttcatctaaatcagttggcaatcctaattgttgtaattctttttctaataaatgtaacaaatcccattgcttttcagttgaaggtgttgttgtagattttggatcagattgcgtatcaattgtcgtatatcttgttaatctatctatcaattggttcttcattatattcgaccccttaaactctattattcatgttgtaagattttttatatgtcttacctttgattttaccatacagttgtttgatacgtgtgtacaggtaatatagaatttcagaaactaatataccgaaagcaatcgcacctgaaatcagtgtaacttctaaaaatgtatttacagcacttgtataatcattcgatactaaaaaacgagtcgcttgataagctgcaccaccaggtactaatggtataatgcctggcactatgaatataattaccggtcgtttatatctgcgactcatagtatgactcattaagcctaaaattaagcttcccaaaaatgaagcgccaacttttccaaactctaaatctaccgttaattggtaaatcgtccatgcaatggcacctacaaatccacatgctactaagagacgtttgggtgcattgaaaatgatagagaaaagtactgttgatataaagctgattgtaaaatgaaataaataaaatagcatgctttaacagtccttccttaaatgattaataaaacgattgcgacaccagcaccgattgcgaatgctgttaatgcagcttcaacaccacgagacatacctgcaagtaattcacccgctaataaatctcgaatggcattggtaattaatataccagggacaagtggcatgacactggctatagtaatgatatcttgattggttgcaatacctaatttagtaaatgtggctgcaatggatatgaccacagcggctgcaacaaactctgagaaaaatttaatttgtatatagcgttgcacaaagctgaatgttaaaaatgcggatccaccagcaatgactgcaatccaacaatctgatgcgacaccaccaaacatgaacaggaagaagccacatgcaatggcagcggcaaagaaattcgttaaaaaagaatattgtaatgatgcatgctgtaaatgaataaattcagatttagcttcatcaattgtgagttctttatttgatattttacgtgaaagactattcgttaaagcgattttctctaaatctgttgtacgctcttgtacacgaattaatcttgtacttgttcgatcgtttaatgaaaaaataattgcagttgaactgacaaaactatatgtattatgaagaccataactatgtgcgatacggttcattgtatcttcaactcgatatgtttcagcacctgattcaagtaaaattctacctgcaattaatacaacatcaatcactttgttttcatctataattgtgattgaatctggcatatcaattcacctccaatgatatgtgttatttatttgaacaattgaagtttacaacttgttgttgcaactttcaatagtgagactttgtgttagtatgatgaacttgtatggttcaaatttaaataagaaaaactgttaatctttgctattatactatgatttaataatagcaaaggattaacagttttgtcgttgttatagattgataatagggttaaacattactttgtttcgcccttgatttttggctacatgcaccatatcgtctgcatctttaaacactttacgctgtgattttggatcgtcatctgttaaataaccaacaccgatagacactgacaatttaataacttctttgtttggtaaatggaatgatgatttttcaacacccgaacgaatattttcagctaatttaacactttgatcaagtgaatagttgtgaatgacaactgagaactcttcgccaccatttctaaaaattttaaattgattcggcacatagtttttaagtaattgagacatttgttttaatacagcatcacctgatttgtgtgagtaggtatcattgacatctttaaatccatcgatatcgattaataataatgcgatactttgatgttctttttcagcttttcgtgaaatttcatttaaatgtctatcaaattcttttacattacctaagcctgttaagtaatcatatttatcttcgttttcataacgatttacgagtgagaagaaatgccaaatatcgacaaaagttatcgctgaagctaaagtgataattaatgaaattggtattaaaatgataacttccgatagtgtgtatatagggctcactaatgcgacaccaaataaaatgattattgtaacaacattaagtattaataatgatagcacatcattttgttttaaaaatggtccaatagcacttgttactgcggcaataacaatcaacgtaacaccgtacataaccgagttgttaaatactacaatttcaacaattgctacaattactgtagcagataatgtatagaccatatttgtaaatctacctaaaaataataaaggaacgaatgttaagtgaattaaataatcttcacgataagggatagggtagacagataataataatgatacgattgtcattaaaacagtgacataagccttagaaaaaaccatacgtttgttttctgaatactgtaagcgatggaataaatagattccagcgactataacagatatattgtatataaatgcttcgaacatgtctgaatcgactcctttaattgaccactagctattgtaagtgaaaacttacaatttgtcattagtttacatataaaattaatgtatgatatagactttgatgttaaaatgttgccttaaatgatatgatgaaaaaatgaataataggcgatatataagaaatgaatcgtatagttgtaaatatgatatcattaattgagcgaattaatttataataaagctataagatatacgtagaaaatagatatatcattctataaagacaatattaaataaatataacgttaaaaacaattaatatcgatgaaggtgaataaatggttacattattactagttgcagtaacaatgattgtcagtttgacgataacaccaattgttattgcaatatcgaaaagattaaatttagttgataaaccaaattttagaaaagtacacactaaacctatttcagttatgggtggtacagtgattctcttttcatttttaataggtatttggattggtcatcctattgaaacagaaatcaaaccacttattattggtgcgattattatgtacgtacttgggcttgtagatgatatctacgatttgaaaccgtatataaaattggctggtcaaattgccgctgccttagtagttgctttttatggtgtgactattgattttatttcgttgccaatgggtacaacgattcattttggatttcttagtattccaattactgtgatttggattgttgctattacaaatgcaattaacttaattgatggactcgatggtttggcgtcgggtgtttctgcaatcggactcatcacaataggattcattgcaattttacaagctaatattttcataacgatgatttgttgtgttttattaggctctttaattgggtttttattttacaatttccatcctgccaaaatatttttaggtgatagtggggctttaatgattggatttatcatcggattcctttctttactcggattcaaaaatattacaattattgcattgttcttcccaattgtaatcctagcagttccattcattgatactttgttcgcaatgattcgacgtgtgaaaaaaggacaacatataatgcaagctgataaatcgcatttgcatcataaactattagctttaggctacacacatagacaaacagtattattaatctattcaatctctattttatttagtctttcgagcattatcttgtatgtatcgccaccattaggtgttgtattaatgtttgtattaatcatatttagcattgaattaattgttgaatttacaggattaatagataacaactaccgaccaatattaaatttaattagtcgtaagtcatctcataaagaggaatagggaatgaaagcatagatgtatgggataatttgtattatatggctttattctttacaattttttatgtattaaatttcaaatataaaaaagcactgccataaacgtgtacttcaattgtcgtttaataatacgcaattgatatttaccgttttatgatagtgctttttatttttattcagttggtatatcgaaaggcaactgctttggagtttcttcagttaaatcgaaatttccagcagtcatttgatttaaaaagttaataaacgcttcatagtcacttttaacgacatcgatatagtagcttaccttatcagtgtaagtttggtttcttaacataaaatgagttgaagctaattcatactcaaatttaccagtttgatcataattcagtgttactatacatggtactgcttctcgtagttcgacacgtccgacatcataaatgacgtctctaacagcaccgctataggcgcgaattaaaccgccaccacctaatttaataccaccaaaatatcttgttactacgacacacgcattatgaacatcgagcttttttaatatgtctaacattggaacaccggcagttcctgtcggttcaccatcatcattcgctttttgaatattcatttcaggtccaatagtatatgcagaacaattatgagtggcatctttatgttctttttttattgcagcaataaatgctttagcttcatcttcattttgaacaggtttgatatgagcaatgaatcttgatttactaatcacattttcaataatgtgttcttttttaacagtaatgatattttgtgtcataataactccttaattcataagcttaagattatttaatcttcattatacactgaaaatgatatgactataaatcgtttgattgccattttctttttaactgaaatattgtatcattgctatgagtatattttaggaggccgactatgaaaattgctgtgatgaccgattctacaagttatctgtcgcaggacttaatcgataaatataatattcaaatagcgccattaagtgtgacttttgatgatgggaagaactttacagaaagtaatgaaatagcaattgaagaattttataataaaatggcatcgtctcaaacgattccaacaacaagccaaccagcaattggcgaatggattactaaatatgaaatgttaagagatcaaggatacacagatatcattgtcatttgcttatcaagtggaattagtggaagttatcaatctagttatcaagcaggggaaatggttgaaggtgttaatgtacatgcatttgatagtaagcttgcagcaatgattgaaggatgttatgtattacgtgctattgaaatggttgaagaaggatacgaaccacagcaaattattgatgatttaactaatatgcgtgaacacacaggtgcatatttaattgttgatgacttaaagaatttacaaaaaagtggtcgaattactggtgctcaagcatgggttggaacattattgaaaatgaagccagttctaaagtttgaagatggtaagattataccagaagaaaaagttcgtactaaaaagcgtgccattcaaacattagaaaagaaagtattagaaattgtaaaagactttgaagaagtaactttatttgtcataaatggagatcatttagaagatggtcaagcgttatacaaaaaattacaagaagattgtccttcagcttatcaagtagcatactctgagtttggtccagttgttgcagcacatttaggttctggtggattaggtttaggctatgttggcaaaaaaataagattaacataattataaaattttaataaaagagtctatattgtaattggaaattatctctcgtatacatggctttaaatgttcatcatttgaaagtcaaaatactaaagatataagaaaatcattataatattaggctctttttttacgttgaaatgaggttttaagcattaaacattacgggaaattaattcatcctcatacttcacttacaaatgaaaaaattaaaaaagaagtaacaggtgtcatcaaacaaaagtcaaactattattgtgttcaatgtgaaagtacaaatccaaagcatttttatcagtatgattcctcagtacattccaagaaaattgtatattgcagaaattgtatatcactgggtcgaatggataatgtaacaagatataaaataacagagagttcgcaaagttcatcacaagcatattatcatctctcatttgaattgtcggaacaacagtcttatgcctcagaacacattgttcgagccattagaatgagacaaacgattttgttatatgcagtaacaggtgcaggtaagacagaaatgatgtttcaaggcattcaatatgcaagacgacagggagataatatagctattgtgtcaccacgtgtagatgttgttgtagaaattagtaaacgtattaaagacgcatttcttaatgaagatatagacatactacaccagcaatcaagtcaacaatttgaagggcattttgttgtatgcacagtgcatcaactttaccgattcaaacagcactttgatactatttttattgatgaagtcgatgcctttcctttatcaatggataaaagtttacaacaagcattaaagtcatctactaaagttgaacatgcaacgatttatatgacagcaacaccaccgaaacaacttctgtcagagattccccacgaaaatataattaaattgccagctcgctttcataaaaaatcacttccaattcctaaatatcgctatttcaaacttaataataataagattcagaaaatgttatatcgaattttacaagatcaaattagtaatcaacgttatacactggtgttttttaacaatatagaaacaatgattaaaacgttttcggtttataagcagaaaattactaaattaacatatgtccatagcgaggatgtttttcgctttgaaaaagttgaacaattaaggaatggacatttcgatgtcatttttactacgacaatattagaacgtggatttacaatggcaaatttagatgttgttgttatcgatgcacatcaatatactcaagaggctttaatacaaattgctggacgtgttggacgaaaattagaatgtcccactggaaaagtattgttttttcatgaaggagtaagtatgaatatgattctagctaaaaaagagattcaaaatatgaacaaattagcattaaaaagaggttggattgatgaataattgtttgagttgtggtgctaagttatatgaaaatataaccatttataatttgttcaagaaacctaatagattatgtgacagatgcaaagagaattgggacaatattaaacttgatattaaagcaaggcgatgttcaaggtgcttaaaacacttaaatcaaaatgaagcgtattgtttagactgcaagtttctatcggcacactttaatttaatggaacaattatattgtcaatttcaatatgacggtttaatgaaagagatgatacatcagtataaatttttgaaagactattatttatgtgaattattggcacatttgattgaaataccacaaacaacttatgactatattgtgccaattccttcttcgccgccacatgatttatctagaacatttaacccggtagaagcagtactaaaagctaaagggattcgctttgataagattttaaagatgtcaaatagaccaaaacagtctcatttaactaagaaagagcgtctggcagatgaaaatccatttattattgatacggaattagatttaaacgacaaggaaatattactcgttgacgatatttatacaactggattaacaattcatcgtgcagggtgtaaattatatgctaaaaatatcagaaaattcaaagtgtttgcgtttgcacgatagcgtaaaaatgttaaaatataataaagagttaccaataaagaggtttaaggagagattactatgattagatttgaaattcatggagataacctcactatcacagatgctattcgcaactatattgaggaaaaaattggtaagttggaacgttattttaatgacgtaccaaatgcagtggcgcatgttaaagttaaaacttattcaaattcagctactaaaattgaagtaacaattccattaaaaaatgttacgttaagagctgaagagcgaaacgatgatttatacgcaggtattgatttaattaataataaacttgaaagacaagttcgaaaatataaaacacgtattaatcgtaagagccgtgatcgaggcgatcaagaagtgtttgttgccgaattacaagaaatgcaagaaacacaagttgataatgacgcttacgatgataacgagatagaaattattcgttcaaaagaattcagcttaaaaccaatggattcagaagaagcggtattacaaatgaatctattaggtcatgacttctttgtattcacagacagagaaactgatggaacaagtatcgtttaccgccgtaaagacggtaaatatggcttgattcaaactagtgaacaataaattaagtttaaagcacttgtgtttttgcacaagtgctttttttatactccaaaagcaatttctaactatttcatagttctataatgtaatttgttgaatgaaacatagtgactatgctaatgttaatggatgtatatatttgaatgttaagttaataatagtatgtcagtctattgtatagtccgagtcgaaaatcgtaaaatatttataatataatttattagaaagtataattgcgtattgagaatatatttataaatgataaacttgttgacaacagaatgtgaatgaagtatgtcataaatatatttatattgattctacaaatgagtaaataagtataattttctaactataaatgataagatatattgttgtaggccaaacagttttttagctaaaggagcgaacgaaatgggatttttatcaaaaattcttgatggcaataataaagaaattaaacagttaggtaaacttgctgataaagtaatcgctttagaagaaaaaacggcaattttaactgatgaagaaattcgtaataaaacgaaacaattccaaacagaattagctgacattgataatgtcaaaaagcaaaatgattatttagataaaattttaccagaagcatatgcacttgttagagaaggctctaaacgtgtattcaatatgacaccatataaagttcaaattatgggtggtattgcaattcataaaggtgatatcgctgagatgagaacaggtgaaggtaaaacgttaacagcgacaatgccaacatacttaaatgcattagctggtagaggtgttcacgttattacagtcaatgaatacttatcaagtgttcaaagtgaagaaatggctgagttatataacttcttaggtttgactgtcggattaaacttaaacagtaagacgactgaagaaaaacgtgaagcatatgcgcaagacattacttacagtactaacaatgagttaggttttgactatttaagagataacatggtgaattattctgaagatagagtaatgcgtccattacattttgcaatcattgatgaggttgactcaattttaatcgacgaggcacgtacgccattaattatttctggtgaagctgaaaagtcaacgtcactttatacacaagcaaatgtttttgcgaaaatgttaaaacaggacgaagattataaatatgatgaaaaaacaaaagcagtacatttaacagaacaaggtgcggataaagctgaacgtatgttcaaagttgaaaacttatatgatgtacaaaatgttgatgttattagtcatatcaacacagctttacgtgcgcacgttacattacaacgtgacgtagactatatggttgttgatggcgaagtattaattgtcgatcaatttacaggacgtacaatgccaggacgtcgtttctcggaaggtttacaccaagctattgaagcgaaggaaggcgttcaaattcaaaatgaatctaaaactatggcgtctattacattccaaaactatttcagaatgtacaataaacttgcgggtatgacaggtacagctaaaactgaagaagaagaatttagaaatatttataacatgacagtaactcaaattccgacaaataaacctgtgcaacgtaacgataagtctgatttaatttacattagccaaaaaggtaaatttgatgcagtagtagaagatgttgttgaaaaacacaaggcagggcaaccagtgctattaggtactgttgcagttgagacttctgaatatatttcaaatttacttaaaaaacgtggtatccgtcatgatgtgttaaacgcgaaaaatcatgaacgtgaagctgaaattgttgcaggcgctggacaaaaaggtgccgttactattgccactaacatggctggtcgtggtacagatattaaattaggtgaaggcgtagaggaattaggcggtttagcggtaataggtacagaacgacatgaatctcgtcgaattgatgaccagttacgtggtcgttctggacgtcaaggtgataaaggggatagtcgcttctatttatcattacaagatgaattaatgattcgttttggttctgaacgtttacagaaaatgatgagccgactaggtttagatgactctacaccaattgaatcaaaaatggtatcaagagctgtagaatcagcacaaaaacgtgtagaaggtaataacttcgacgcgcgtaaacgtatcttagaatacgatgaagtattacgtaaacaacgtgaaattatctataacgaaagaaatagtattattgatgaagaagacagctctcaagttgtagatgcaatgctacgttcaacgttacaacgtagtatcaattactatattaatacggcagatgacgagcctgaatatcaaccattcatcgactacattaatgacattttcttacaagaaggtgacattacagaggatgatatcaaaggtaaagatgctgaagatattttcgaagtcgtttgggctaagattgaagtagcatatcaaagtcaaaaagatatcttagaagaacaaatgaatgagtttgagcgtatgattttacttcgttctattgatagccattggactgatcatatcgacacaatggatcaattacgtcaaggtattcacttacgttcttatgcacagcaaaatccattacgtgactatcaaaatgaaggtcatgaattatttgatatcatgatgcaaaatattgaagaagatacttgtaaattcattttaaaatctgtagtacaagttgaagataatattgaacgtgaaaaaacaacagagtttggtgaagcgaagcacgtttcagctgaagatggtaaagaaaaagtgaaaccgaaaccaatcgttaaaggtgatcaagttggtcgtaacgatgattgtccatgtggtagtggtaaaaaattcaaaaattgccatggaaaataaatgatatataataactccttccaattaaacacctatagtttgtgttatgggaggagtctttttattttacaagcgttaaatacttttaaaaaatgtgaagaagttgttcaacgttgttgtgtacttggtttttaaaaaagatttaggcatatgtcaatgataaatgtactgatttttaacaataaaagcataagctgattgtcagtgtgcttatatttcttaacattgttatttaacaaaattatgttaaaatttagcattataaaagatacaaatcaatgacttgaattgaaatataaataggagcgaaggctatggaattatcagaaatcaaacgaaatatagataagtataatcaagatttaacacaaattagggggtctctttgacttagagaacaaagaaactaatattcaagaatatgaagaaatgatggcagaacctaatttttgggataaccaaacaaaagcgcaagatattatagataaaaataatgcgttaaaagcaatagttaatggttataaaacactacaagcagaagtagatgacatggatgctacttgggatttattacaagaagaatttgatgaagaaatgaaagaagacttagagcaagaggtcattaattttaaggctaaagtggatgaatacgaattgcaattattattagatggacctcacgatgccaataacgcaattctagagttacatcctggtgcaggtggcacggaatctcaagattgggctaatatgctatttagaatgtatcaacgttattgtgaaaaaaaaggttttaaagttgaaactgttgattatttacctggagatgaagcggggattaaaagtgtaacattgctcatcaaagggcataatgcttatggttatttaaaagctgaaaaaggtgtacaccgactagtacgaatttctccatttgattcatcaggacgtcgccatacatcatttgcatcatgcgacgtgattccagattttaataatgatgaaatagagattgaaatcaatccggatgatattacagttgatacattcagagcttctggtgcaggtggtcagcatattaacaaaactgaatcggcaatacgaattacccaccacccctcaggtatagttgttaataaccaaaatgaacgttctcaaattaaaaaccgtgaagcagctatgaaaatgttaaagtctaaattatatcaattaaaattggaagagcaggcacgtgaaatggctgaaattcgtggcgaacaaaaagaaatcggatggggaagccaaattagatcatatgttttccatccatactcaatggtgaaagatcatcgtacgaacgaagaaacaggtaaggttgatgcagtgatggatggagacattggaccatttatcgaatcatatttaagacagacaatgtcgcacgattaatatatattttaaaaccgaggttctaaaagggcatcggttttggtttttttaaaggtagctaaataaattgtaaattagattttggaatatgatttgtttatgaatatttaagtacaattcggtagtttttgacgaaatattatcctttataaaagtttcgtttgttaaacaaatctatgtactgtgcattaagtaatattaccttcaacgaatttcaatgtattgaattaaatgttgaaaacgttgtcaatcatttgcagtgaatacattttacaccgagtagctagttttcagtatttttatattgttaaccatttgattacatcgttataacaatagcttttgataaaatgtattgtgctatagtatttgcatacttaaaatactaacagcaaaggaatgacagcaagatgaaaaaatctcttacagtgacggtttcgtcagtgttagcttttttagctttaaataatgcagcacatgcacaacaacaaggcacacaagtaaaaacacctgttcaacataattatgtatcaaatgttcaagcacaaaaacaatcaccgacaacttatacagtagttgctggcgattcattatataagattgctttagagcatcacttaacgttgaatcaattatattcatacaatcctggtgtaacacctttaatttttcctggtgacgtgatttcacttgtgcctcaaaataaagtgaaacaaactaaaacagttaaatcaccagtaagaaaagcaagccaagctaaaagggtagtacaacaacctgtacaacaagcgtctaaaaaagtagtagttaagcaagcacctaagcaagcagtagctaagacagttaatgtagcatataaacctgctcaagtacaaaaatcagtacaactgtacctgttgcacataactacaataaatcagtagctaacagaggaaacttatatgcttatggaaactgcacatattacgctttcgatcgtcgtgcacaattaggtagaagtataggaagtttatggggcaatgcaaataactggaattacgcagcaaaagttgcaggatttaaagtagataaaacaccagaagttggcgctattttccaaacagctgctggtccatatggacatgttggtgttgttgaatctgtaaaccctaatggaacaattactgtttcggaaatgaactatgctggatttaatgttaaatcttcaagaacaattttaaatccaggaaaatataattacatccactaagtaatatatcaagactagactatcctcttagcctgtttaagtaacaggttgagaggattttttggtatcatttaatcagagttatataaagaagatatttaaatgatatttaattgaatgatatgtaaaaagaaagtataatttatgattaattaatggaggaggtaattgaaatgggtgtacatcaatattttaaaagattatcagatatggaaagacttataagattacctggaaaatttaaatattttgaacacaatgttgcagcacactcctttaaagtaactaaaattgctcaatatttagcaacagttgaagaatatcatggacgaaagattaattggaaaagcttatatgaaaaagcattaaatcatgatttcgctgaagtgtttactggtgatataaaaacacctgttaaatatgcgagtagtgaattaaaaaaattattttcgcaagttgaagaagaaatggtagagacctttattgaagaagaaattccattacaatatagagatgtttataagcaacgactgcaagaaggtaaagatgattcattagaaggtcaaatactttcagttgctgataaaattgatttgctttatgaaacatttggagaaatacaaaaacgtaatcccgaagaattatttttcgaaatttatgaaatgagtctagaaacaattattcaatttgaccatttagcatctgtacaagattttattaataatatcattccagaaatgttgactgaaaactttatacctagaacagaattaagagaaacaaccatgaacattttaaataaaagaaaagaggaaaatggatgatatggtattttagcgcagcattctttccatgtgtcttggtagtattgtttagtgtaataacaagaagtaaatgggtcggtactattctgacattaattttaattggtgcctcaatctataaagagtatttccataacgagtggataatttttattgatgtagtgtcattattagctggttatttaattatagatcaactcgaatttcataaacatcaagatgaagatcgctaagtttaactttaaaataatgtttcaaacaaatttgttgaaacaaaatgatgattaatataatgtgtatttacatactaaaaataacaagataaacgatttgatttaaggcaagcatagttagcacaactatgtttgtttttctttgttcgacatttttacgaacaaacgtttgctttttgtgtgactactttgctaaaatatgtaatgagaaatcgaagagttgagcggaaatataaataatacgttgaaagaggaggcatatgtgactatggttgaacattatccttttaaaatacattctgattttgagcctcaaggtgaccaaccgcaagcaattaaggaaatcgtggaaggtattaaagcggggaaaagacatcaaactttattaggtgcaactggcacagggaaaacatttacgatgagtaatgttattaaagaagttgggaaaccaacgttaattatcgcgcataacaaaacattagcaggacaattatatagtgagtttaaagaattttttcctgaaaacagggtggaatactttgtaagttactatgattattatcaacctgaggcatacgtaccgtctactgacacttttattgaaaaagatgcctcaatcaatgatgaaattgatcaactacgacattctgctacaagtgcattatttgaacgcgatgatgtaattattattgctagtgtaagttgtatatatggtttaggtaatccagaagaatataaagatttagtagtaagtgttcgagttggtatggaaatggatagaagtgaattacttagaaaacttgtagatgtgcaatatacacgaaatgacatcgatttccaacgaggaacgtttcgagtgcgtggagacgtcgttgaaatattcccagcctctaaggaagaactatgtatacgagttgagttttttggtgacgaaatcgatcgtatccgagaagttaattatttaacaggtgaagtgttgaaagaaagggaacattttgcaatcttccctgcatctcacttcgtcacacgtgaagaaaagatgaaagttgcgattgaacgtattgaaaaagaattggaagaacgattgaaagaattacgagatgagaataaattactagaagcgcaaaggttagaacagcgtaccaattatgatttagaaatgatgcgagagatgggattctgttcaggaattgaaaactattccgtacatttaactttgcgaccactgggttcgacaccatatactttattggattactttggcgatgattggttagtaatgattgatgaatcacatgtgacattaccgcaagttcgaggcatgtataatggagacagagcgcgtaaacaagttttggtggatcatggatttagattaccgagtgcgttagataaccgcccacttaaatttgaagaatttgaagaaaagacaaaacaacttgtttatgtatctgcaacgcctggtccatacgaaattgaacatacggataagatggttgaacaaattattcgtcctactggtttactggatcctaagattgaggttagacctactgaaaatcaaattgatgatttattaagtgaaattcaaacaagggttgagcgtaatgaacgcgtacttgttacaacgctcactaaaaagatgagtgaagatttaaccacatacatgaaagaagcaggcattaaagttaattatctgcattcagaaatcaagacattagaacgaattgaaattataagagatttacgtatgggtacgtatgatgtcattgtagggattaatttattaagagagggtattgatattccagaagtgtctttagttgtgatattagatgcagataaagaaggatttttacgttcaaatcgttcattaatacaaacaataggtagagccgcacgtaatgatcgaggcgaagtgattatgtatgctgataaaatgactgattcaatgaagtatgctattgacgaaacgcaacgtcgtcgagaaattcaaatgaaacacaatgaaaaacacggtattacacctaaaacaattaataaaaaaatacatgatttaattagtgctactgttgaaaatgacgaaaataatgacaaagcacaaactgtgatacctaagaagatgacgaaaaaagaacgtcaaaagacaatcgacaatatagaaaaagaaatgaaacaagcagcgaaagatttagatttcgagaaagctacagaattaagagatatgttatttgaattaaaagcagaagggtgacaagtaaatgaaagaaccatccatagtagttaaaggtgcacgtgcgcataacttgaaaaatattgatattgaattaccgaaaaataaactaattgtaatgactggattatcaggttctggtaaatcttctttagcatttgatacgatttatgctgaaggacaacgtcgttatgttgaatcattaagtgcttatgcacgtcaatttttaggacaaatggacaaaccagatgttgatacaattgaaggtttatctccggcaatatctatcgatcaaaaaacaactagtaaaaatccaagatcgacagttgcaacggtaacagaaatatatgattatattcgtttgctttatgcacgtgtcggtaaaccatattgtccaaatcatcatatcgaaattgaatcgcaaacagtacaacaaatggttgaccgtattatggagttagagacacggacaaagattcaattattagcacctgtcatctctcatcgaaaaggtagtcatgaaaaattaatcgaagatattggtaaaaagggttatgtgcgtttacgtattgatggagaaattgttgatgtaaatgaagtgcctgaattagataaaaataaaaatcatacaatcgaagtagtagttgatcgtttagtggtgaaagaaggtattgagacacgtcttgcagactctatcgaaaccgcgttagagctttcagaaggacaattaacagtcgatgtcattgacggggaagaccttaagttttcagaaagccatgcttgtcctatatgtggattttcaatcggagagttagaaccaagaatgtttagctttaacagtccttttggtgcttgcccaacatgtgatggcttaggtcaaaagttaacagtcgatgtagacttggttgttcccgacaaagataagacgctaaacgaaggtgcaatagaaccttggataccgacgagttctgatttttatccaacattgttaaaacgtgtttgtgaagtttataaaatcaatatggataaaccttttaaaaagttaacagaacgtcaacgtgatattttattgtatggttcgggcgacaaagaaattgaatttacatttacacaacgtcaaggtggtactagaaaacgaacaatggttttcgagggtgtagttcctaatataagtagacgattccatgaatctccttcagaatatacacgtgaaatgatgagtaaatatatgaccgaactaccttgtgaaacttgtcatggacaacgattgagtcgtgaagcgttatctgtttatgtaggtggtttaaatattggtgaagtagtcgaatactcaattagtcaagcgctgaactattataaaaacattaatttgtcagaacaagatcaagcaattgcaaatcaaatattgaaagaaattatttcccgactcacttttttaaataatgtgggacttgaatatttaacgctaaacagagcttcaggtacactttcaggtggtgaagcacaacgtattcgattggcaacgcaaattgggtcacgtttgactggtgtcttatatgtattagatgagccatcaattggactgcatcaaagagataatgatcgattaattaatacacttaaagaaatgagagatttaggaaatactttaattgtagttgaacacgatgatgatacaatgcgtgcggctgattacttagtggacatagggcctggtgctggtgagcatggaggacagattgtgtctagtggtacacctcaaaaggtaatgaaagataaaaaatctttaacaggacaatacttgagtggtaagaaacgtattgaagtacctgaatatcgcagaccggcttcagatcgtaaaatttctatacgtggagctagaagtaacaaccttaaaggcgttgatgtggacataccactttcaatcatgacggtcgttacaggtgtatcaggttctggtaaaagttcattagtaaatgaagtattatacaaatcattagctcaaaaaatcaataaatctaaagtaaagccaggattgtacgataagattgaaggtattgatcaacttgataaaattattgatattgatcaatcaccgataggtagaacgccacgctctaatccagcaacgtatactggtgtgtttgatgatatacgtgatgtgtttgcgcaaacaaatgaagctaaaattcgaggatatcaaaaaggtcgttttagttttaatgtaaaaggtggacgctgtgaagcttgtaaaggtgacggtattattaaaattgaaatgcattttttacctgatgtttatgtaccttgtgaagtatgtgatggtaaacgatacaatcgtgagacgttagaagttacttataaaggtaaaaacattgcagacattttggaaatgactgttgaagaagcaacacagttttttgaaaatattcctaagattaagcgcaagctacaaacactagttgatgttggccttggatacgtcacattaggtcaacaagctacaacgttatcaggtggtgaggctcaacgtgtgaaacttgcatctgaacttcataaacgttcaactggtaaatctatttatatcctagacgaaccgacaacagggttacatgttgacgatattagtagattattaaaagtattaaaccgattagttgaaaatggtgatactgttgtaattattgaacataacctagatgttatcaaaacagcagactatattatcgacttaggtcctgaaggtggtagtggcggtggtactattgttgcgactggcacacccgaagatattgctcagacaaagtcatcatatacaggaaagtatttaaaagaagtacttgaacgagataaataatataccgaaaattaatatctgtctaagaagtgaagggtgtgattatgtcatctttcacttctttttgtatgatcttaagcaaatgcataaaaataagatgaataaaacaaactgtgttaatattagttttaaataaacaagctgaaacgaatgattacgtgtaaatgtttagatgaaatcaataactgtatttctagcaattttaaaactacaatgaaataaaagcttcaaatatagggttgacagtgacttataacacaataacaataatgaacaattaatatttattttagcttttcaatgtagattggtgttatatttttgatatgataagaagagatgtaagagtagggataaatacaattgaggtgaacccatgttaacgacagaaaaactagttgaaacattaaagttagatttaatcgctggtgaagaaggactatcgaagccaattaaaaatgctgatatatcaagaccgggcttagagatggcaggttatttttcacattatgcgtcagatagaatacaactattaggaacaacggaactatcgttttacaatttattaccagataaggatcgcgcaggtcgtatgcgtaaactatgcagaccagaaacgcctgcaattattgtaactcgtggattacagccaccagaagaattagttgaagctgcaaaagaattaaatacgccacttatagttgctaaagatgcgactacaagtttaatgagtcgcttaacaacgtttttagagcatgcacttgcaaagacgacatctttacatggtgttttagtagatgtttacggtgttggtgtactaattaccggtgattcaggaataggtaaaagtgagactgcgttggagttagttaaacgtgggcatagattagtagcagatgataatgtagaaatacgtcaaattaataaagatgaactaataggaaaaccaccaaagttaatagaacatctattagaaatacgtggactaggtattatcaatgttatgactttatttggcgcgggttcaatattaactgaaaaacgaattagattaaatattaatttggaaaactggaacaagcaaaagttatatgaccgcgtaggtcttaatgaagagacgttaagtattttagatactgaaatcactaaaaaaacaatacctgtaagacctggtagaaatgttgcggtaattattgaggtcgctgcaatgaactatcgattaaatatcatgggcattaacactgccgaagaatttagtgaaagattaaatgaagaaattatcaagaacagtcataagagtgaggagtaggttgaatgggtattgtatttaactatatagatcctgtggcatttaacttaggaccactgagtgtacgatggtatggaattatcattgctgtcggaatactacttggttactttgttgcacaacgtgcactagttaaagcaggattacataaagatactttagtagatattattttttatagtgcactatttggatttatcgcggcacgaatctattttgtgattttccaatggccatattacgcggaaaatccaggtgaaattattaaaatatggcatggtggaatagcaatacatggtggtttaataggtggctttattgctggtgttattgtatgtaaagtgaaaaatttaaacccatttcaaattggtgatatcgttgcgccaagtataattttagcgcaaggaattggacgctggggtaactttatgaatcacgaggcacatggtggacctgtgtcacgcgcttttttagaacaattacatttgcctaattttataatagaaaatatgtatattaacggccaatattatcatccaacatttttatatgaatccatttgggatgtcgctggatttattatcttagttaatattcgtaaacatttaaaattaggagaaacattctttttatatttaacttggtattcatttggtcgattctttatagaaggattacgtactgatagcttaatgctcacaagtaatattagagttgcacaattagtatcaattcttttaattttaataagtataagtttaattatatatagaaggattaagtataatccaccgttgtatagcaaagttggggcgcttccatggccaacaaaaaaagtgaagtagtgatattttgagaaaatttttatcaaaaacacatcatcatacaaaccctttatggcatgtataccgtcttgttaaattttcgaaagtttttaagaatgtaattatcattgaattttcgaaatttattccaagtatggtactgaaaagacatatatataaacaacttttaaatattagtatcggtaatcaatcgtcgatagcttataaagtaatgttagatattttttatccagaactgattacgattggtagtaacagtgttattggttacaatgtaacaattttgacgcatgaagcattagttgatgaatttcgttatggaccagtgacgataggatctaacactttgattggtgcaaatgctaccattttacccggtataacgattggtgacaatgtaaaagttgcagctggtacggttgtttcaaaagatataccggataatggatttgcatatggcaaccctatgtatataaaaatgattaggaggtgacaattttatggcgcaaaagaataataatgtaattccaatgacttttgatgatgcattttatcgtaaaatggctaatcagaagtttaaacaaagagaatataaacgagctgctgaatactttgaaaaagtgttagaattgtcacctgatgatctggaaattcaaattgattatgcacaatgtctagtgcaacttggtattgctaaaaaagcagaacatttattttatgacaatattatttataataggcatctagaagatagcttttatgaattgagtcagctcaacattgaagttaacgaaccaaacaaggcattcttgtttggtattaattatgttattgttagcgacgaccaagattatagagatgaattagatcaaatgtttgatgtgaaatatcaaagtgaagaacaaattgaacttgaagctcaattgtttgtagttcaaatactattccaatatcttttttctcaaggtcgattaaaagatgcaaagaattatgtcttacatcaaccacaagaagttcaagatcatcgtgtcgtacgtaatttactggcaatgtgttatttatatctcggcgaatatgatacggctaaagcattgtacgaagcactattacaagaggatagtacagatatatatgcattatgccattatactttgctactttataacactaaggaaaatgaacaataccaaaagtatttaaaaatattaaataaagttgtacctatgaatgacgatgaaagttttaaattaggtattgttttaagttatttaaagcagtatcgtgcatcacaacaattgttgtaccctttatataaaaaagggaaatttttatcaattcaaatgtacaatgctttagcatataattattattatttaggtgaagaagacgaaagtcattactactgggataaattgaagcaaatttctaaagtggaaattggacatgctccttgggtaattgaaaatagtaaagaagtttttgaccaacatattttgccattacttcaaagtgatgacagtcattatcgtttatatggtatttttttattggatcaattaaatggcaaagaaattgtgatgacggaaagtatttggcaggttctggaaaatctaaataattatgagaaattgtatttaacgtatttagttcaaggtttaacactcaataaattagacttcattcatcgcggcttgttaacgctttaccataatgaattatttgtaagtgaaaatgatttaatggttgcatggattaatcaaggtgaactcataattgctgaaaaagtagatttaactgatgttgagccatatatcggtgcgtttatttatttgtattttaaaaatcaacctcgaaacgttacaaagaagcaaattacaacatggttaggcataacacaatataaactgaacaaaatgattgaatttctcttgagcatatagatttatgaaaagttagatttattatataatgcgcataatgattaataatgaggaggcgttaataaaatgactgaaatagattttgatatagcaattatcggtgcaggtccagctggtatgactgctgcagtatacgcatcacgtgctaatttaaaaacagttatgattgaaagaggtattccaggcggtcaaatggctaatacagaagaagtagagaacttccctggtttcgaaatgattacaggtccagatttatctacaaaaatgtttgaacacgctaaaaagtttggtgcagtttatcaatatggagatattaaatctgtagaagataaaggcgaatataaagtgattaactttggtaacaaagaattaacagctaaagcggtcattattgctacaggtgcagaatacaagaaaattggtgttccgggtgaacaagaacttggtggacgcggtgtaagttattgtgcagtatgtgatggtgcattctttaaaaataaacgcctattcgttatcggtggtggtgactcagcagtagaagagggaacattcttaactaaatttgctgacaaagtaacaatcgttcaccgtcgtgatgagttacgtgcacaacgtattttacaagatagagcattcaaaaatgataaaatagactttatttggagccatactttgaaatcaattaatgaaaaagacggcaaagtgggttctgtgacattaacgtctacaaaagatggttcagaagaaacacacgaggctgatggtgtattcatctatattggtatgaaaccattaacagcaccatttaaagacttaggtattacaaatgatgttggttatattgtgacaaaagatgatatgacaacatcagtaccaggtatttttgcagcaggagatgttcgcgacaaaggtttacgtcaaattgtcactgctactggcgatggtagtattgcagcgcaaagtgcagcggaatatattgaacatttaaacgatcaagcttaattcgaagtcgaattaagatgttgagctgtaaattatttggatatttattttaatagtgtcatcacattgttaaaataatgtcttacttttaaattaaagcaaattatatagaaaactagaacttagtacgtatcatttgtgcgtttcaatgagttctagtttttttatatgttatattaaacttataactttatgggagtgggacagaaatgataaagagccactaatgatttattatgtagtggttcttacacattagccacagctaatgtgtactaaaaaaataggaatacatgagtaaaactcatgcataagaaatactaatttctatagaaaaagtatttctttatcgttgtcccaccccaacttgcacattatcgtaagctgactttacgtcagcttctgtgctggggcccacaccccaactcgcattgcctgtagaatttcttttcgaaattctctgtgttggggccccaccccaacttgcacattattgtaagctgactttacgttagcttctttgttggggcccacaccccaacttgcacattatcgtaagctgactttacgtcagcttctgtgctggggcccctgactataattgaaaaaagcttgttgcaagcgcattttcattcagtcaaatactagcaatataatattatagactctaggacattgatttatgtcccaatctccttttaaatgatgtagatttttataaatttaatctagacatagttgaaaataaatataaaacatcgttgcttaattttgtcatagaacatttaaattaacatcatgaaattcgttttggcggtgaaaaaataatggataataatgaaaaagaaaaaagtaaaagtgaactattagttgtcacaggtttatctggtgcaggtaaatctttggttattcaatgtttagaagacatgggatatttttgtgtagataatctaccaccagtgttattgcctaaatttgtagagttgatggaacaaggaaatccatccttaagaaaagtggcaattgcaattgatttaagaggtaaggaactatttaattcattagttgcagtagtggataaagtcaaaagtgaaagtgacgtcatcattgatgttatgtttttagaagcaagtactgaaaaattaatttcaagatataaggaaacgcgtcgtgcacatcctttgatggaacaaggtaaaagatcgttaatcaatgcaattaatgatgagcgagagcatttgtcccaaattagaagtatagctaattttgttatagatactacaaagttatcacctaaagaattaaaagaacgcattcgtcgatactatgaagatgaagagtttgaaacttttacaattaatgtcacaagtttcggttttaaacatgggattcagatggatgcagatttagtatttgatgtgcgatttttaccaaatccatattatgtagtagatttaagacctttaacaggattagataaagacgtttataattatgttatgaaatggaaagagacagagattttctttgaaaaattaactgatttgttagattttatgatacccgggtataaaaaagaagggaaatctcaattagtaattgccatcggttgtacgggtggacagcatagatctgtagcattagcagaacgactaggtaattatctaaatgaagtatttgaatataatgtttatgtgcatcatagggacgcacatattgaaagtggcgagaaaaaatgagacaaataaaagttgtacttatcggtggtggcactggcttatcagtcatggctaggggattaagagaatttccaattgatattacagcgattgtaacagttgctgataatggtgggagtacaggaaaaatcagagatgaaatggatataccagcaccaggagacatcagaaatgtgattgcagctttaagtgattctgagtcagttttaagccaactttttcagtatcgttttgaagaaaatcaaattagcggtcactcgttaggtaatttattaatcgcaggtatgactaatattacgaatgatttcggacatgccattaaagcattaagtaaaattttaaatattaaaggtagagtcattccatctacaaatacaagtgtgcaattaaatgctgttatggaagatggagaaattgtttttggagaaacaaatattcctaaaaaacataaaaaaattgatcgtgtgtttttagaacctaacgatgtgcaaccaatggaagaagctatcgatgctttaagggaagcagatttaatcgttcttggaccagggtcattatatacgagcgttatttctaacttatgtgtcaatggtatttcagatgcgttaattcattctgatgcgcctaagctatatgtatctaatgtgatgacgcaacctggggaaacagatggttatagcgtgaaagatcatatcgacgcgattcatagacaagctggacaaccgtttattgattatgtcatttgtagtacacaaactttcaatgctcaagttttgaaaaaatacgaagaaaaacattctaagccagttgaagttaataaggctgaacttgaaaaagaaagcataaatgtaaaaacatcttctaatttagttgaaatttctgaaaatcatttagtaagacataatactaaagtgttatcgacaatgatttatgacatagctttagaattaattagtactattcctttcgtaccaagtgataaacgtaaataatatagaacgtaatcatattatgatatgataatagagctgtgtaaaaaaatgaaaatagacagtggttctaaggtgaatcatgttttgaacaagaaaggaatgactgtacgatgagctttgcatcagaaatgaaaaatgaattaactagaatagacgtcgatgaaatgaatgcaaaagcagagctcagtgcactgattcgaatgaatggtgcacttagtctttcaaatcaacaatttgttataaatgttcaaacggaaaatgcaacaacggcaagacgtatttattcgttgattaaacgtgtctttaatgtggaagttgaaatattagtccgtaaaaaaatgaaacttaaaaaaaataatatttatatttgtcgtacaaagatgaaagcgaaagaaattcttgatgaattaggaattttaaaagacggcatttttacgcatgaaattgatcattcaatgattcaagatgacgaaatgagacgcagttacttgagaggagcttttctggcaggtggttcagtgaataaccctgaaacatcttcgtatcatttggaaattttttctcaaaatgagagtcatgcagaaggcttaacgaaactaatgaatagttatgagttgaatgccaaacatttagagcgaaaaaaaggaagtattacgtatttaaaagaagcggaaaagatttcggattttcttagtttgataggtggttatcaagcgttattaaaatttgaagacgtacgtattgtaagagatatgcgtaattctgttaaccgactcgttaattgtgaaacggcaaatctaaataaaacagttagtgctgcgatgaaacaagttgagagtattaaattgattgataaagaaattggtattgaaaatttaccagacaggttgagagagattgctagaattcgagtagaacatcaagaaatttcgttgaaagagcttggagaaatggtatcaactggtccaatttcaaaatcaggtgtaaatcatcgattaagaaaacttaatgatttagccgataagattagaaatggtgaacaaatagaattataagtaagaaggtgtttttggtagtgaattatcaaaaataccttttttatgattaaaaagtgttaaatgaataatagtcgactaactattaaattgagctggaaagtttaatgaaggaaattcaataaccaagcgttacctaattttctcattaaatagcatcatatatatatcaatttggtcataagaaaatatgaatgtgataattaatagagtccttgatcacagacaaaaaaatcagcataaaaaagaatcccgacattgcgggattctctgtattgaaaagtattgtattttatttaaatgcctccttgaagggaattgaacccctatcttaagaaccggaatcttacgtgttatccattacaccacaaggagtaaatatgttaatcaaatcactgtactatcagaagtaaaataagtacaatctaaaatagatattatcagtttacaaaggaaagagacaagcgtcaaacaatgtaactatttaaagtcaaagtgtttgaccaaatttgacttaatatgtaaaataatgagtaacagttattacaaggaggaaatatagatgaatttaattcctacagttattgaaacaacaaatcgcggtgaacgtgcatacgatatatactcacgtttattaaaagaccgtattattatgttaggttcacaaattgatgacaacgtagcaaattcaatcgtatcacagttattattcttacaagcacaagactcagagaaagatatttatttatacattaattcaccaggtggaagtgtaacagctggttttgcgatttatgatacaattcaacacattaaacctgatgttcaaacaatttgtatcggtatggctgcatcaatgggatcattcttattagcagctggtgcaaaaggtaaacgtttcgcgttaccaaatgcagaagtaatgattcaccaaccattaggtggtgctcaaggacaagcaactgaaatcgaaattgctgcaaatcacattttaaaaacacgtgaaaaattaaaccgcattttatcagagcgtactggtcaaagtattgaaaaaatacaaaaagatacagatcgtgataacttcttaactgcagaagaagctaaagaatatggcttaattgatgaagtgatggtacctgaaacaaaataattcaaagtaaagagtagactaagcagtctgctctttttgtatgagtaaaccaaggtatcaataaattgttcaaaatatttcgagtaaaagcaaaaaataacgggtaaaaatgtttgtgagaatttaattagacacgttgtttctgcggttctacaatctaacaaatataaaggatgattttatgaaaggcattgaattacttaacaatccatttttaaacaaaggtacagcttttactaacgaagaaagaaaacagttagggcttgaaggtttattacctgcgaatgttcgaactttagaacaacaagcagaacaatgttatgaacaattcaaggcgaaacaaaccgattttgagaaacgtttatttttaatggcaatttttaatcgtaatcgtacattgttttacaaattgacttcagagcatttagttgaatttatgccaattatttatgaccctgttattgcacaatcgattgaacaatataatgagaatttcagcagaccccaagatgcagtatttttatctgttgatagacaagaccaaattgaacaagaattgcgcaacgttgcaaatgacagagatattcgattaatcgtagtgacagatgcggaaggtatattaggtatcggcgattggggcgttgatggtgtagatattgcaataggaaaattaatagtatatacaggggcagctggaataaatccttctcaagtattacctgtatctttagatgttggtactaataatgaacaattattgaatgatgacctttatttaggaaatcgtcataaacgtgtcgatgatgagacatattacgcatttgtagataaatttgtgagtgcagtgcgtaaagaatatcctaatgcactattacattgggaagattttggtagagggcatgccaaaaatattttagataaatatgaagatacgttaccaacttttaatgatgatattcaaggtacaggtatagttacattagctggcgtactaggtgcattaaatatttctaaagtagattatacgaatcagacgtttttagtttatggtggtggtacagctggtatgggtattaccaatattttaaaagatgaactaattaaacagggtgtttcagaagaaaaagcaaatcagcatttctatattatggataaacaaggattgctgtttgatgatatggatgatttaactgaagcgcaacaagtatttgctaaaaataggaatgaattttcaaatacagtaaactggaaaaatttaaatgaagtaattgaaaatatcaagcctactgttttaatcggtacatcaactcaaacaggtgcatttacagaagatgcagtaaaagagatgtttaaacatacagaacgtccggtgattttcccattgtctaatcctacaaaattatcagaagcaactgcacaagatttattaaaatggactaacggaaaagcattaattggaactggtataccatataatgacattgaatacaatggtgtgaattacagtattggtcaagcaaataatgcattgatgtatcctggtttaggtttgggtcttattgcgtcaaatgcgaagaaagtaaatcaacagattctatcagctgcgagtcatgcacttggtggcatggtcaatccagatgaaccaggtgctgcagtcttaccacctgttgagaaaatacatcaatgttctcgtgccatagccaaagcggttgcacaaagtgtcattgatcaaggattaaacgctgaaactattgatgatattgacaaagcaattgaagctgaaatttggtatcctaaatacaaatcatacatttaattttataaagtagtaaaaggtcatttgaacattttgtttcaagtggccttttcgtatttactttaaaattaatcaaccaatattcataagtgactttaaagttatatctatatgtaatatcagcaaatagaagggagtgggacaaaaatgatatttttacaaatttttttcgttgtccaccccaacttgcacattattgtaagctgactttccgtcagcttctatgttggggccccgccaacttgcacattattgtaagctgactttccgccagcttctatgttggggccccgccggcaaggttgactagagttgaaaaaagcttgttgcaagcgcattttcattcagtcaactactgccaatataatattatagaccctaggacatcgatttatctcctagactttttgcttgaagtggagtaggagagaaatcaatgtcccactcacttactaattaaatcttcaagtgccatttttaaattactatatttaaattggaatcccaatgcttgaattttattaggtaatactttttgagtatccaatactactgttgacatttgaccaagtatgagacgcattgcaagacttggtgcccaagtttcatgaggcttatgcatagctcttgctaaagtgtagccaaataaattttgacgctcaggtataggtgcagttaaattaaacggaccactagctgactctttatttattaaaaataaaatagcttgaattaaatcattgatatgaatccatgaataccattgttgaccagaacctaatttaccaccaatgtaatattcgtatggtagtttcattgtttgtaacgcaccgccttcattcgataaaattataccgaaacgaccgatgacaactcgcgtacctaattgttcaaattgttgtgcgaaacgttcccattgatacacaatatctgataagaaatcaaatggtaaagttttataaacttctgtgtaactcataaataaatcaggaggatagtaaccagtggcactagcattaaataaaactttaggtgctttattacgtgatttaaacaattcatataaagcttgcgtagattgaattctacttagcattagcgtttgtttatattccggtgtccatcgtttattcaatgtagcacctgctaagttgatgaccacatcgatattttgaggaactttgtgttcccacccagatttagcccagttgacatatgaaattttcttatcatttgaaatttggtcgtgtcgcgttaatatcgtgatatgtgaatctgattttttgatttcattaactaattgagatccaaccataccagtcccaccagtaattaagtattgtttcattatcattcaccccatgtaattttgtatttagttactatttaataatcattattgttgttcaaaggttatacattatttagacaataatatgtcaataactttttttgaattgtattttaataaaaatgatataagttataataaaggtgtaccttcgataacgaataaacatctcttaaaagtatgtgtaaaacgctgcatgatacaaacgaaggtaaaaatttgaatccctttagtagtggacccgtacgtttatcgtgcgggtcgtttttatttatatcttattcccgttatacatcaattcaaagcattaattttttaaacaaatttaagaatagatagtaatataacaatctaaacataaaaacttttaacacaacacttaaactaatgctttaattttcaatacgtagctataatttgttgtaaaatcaaaaaggttgaaatgttaattttcaaaaaaaggctcaaaatatgtttgatttagttattaaatgttaagatatataagactactatttctttgtgaaaatgaatccgatttacgagtgagtaatagtgaatacagttttaagttgaagaaggcaaaaagagtaaatgtttattaatgtttgtagaaattaggtaagcaaattagttgtgaaaatattaatggttacgtgataatttctatatttaaattagtttgaagtgagggagagtatgtcgaatcaaaattacgactacaaaacaaatgaagatggaagtaagaagaaaatgagtacaacagcgaaagtagttagcattgcgacggtattgctattactcggaggattagtatttgcaatttttgcatatgtagatcattcaaataaagctaaagaacgtatgttgaacgaacaaaagcaggaacaaaaagaaaagcgtcaaaaagaaaatgcagaaaaagagagaaagaaaaagcaacaagaggaaaaagagcagaatgagctagattcacaaacaaaccaatatcagcaattgccacagcagaatcaatatcaatatgtgccacctcagcaacaagcacctacaaagcaacgtcctgctaaagaagagaatgatgataaagcatcaaaggatgagtcgaaagataaggatgacaaagcatctcaagataaatcagatgataatcagaagaaaactgatgataataaacaaccagctcagcctaaaccacagccgcaacaaccaacaccaaagccaaataataatcaacaaaacaatcaatcaaatcaacaagcaaaaccacaagcatcacaacaaaatagccaatcaacaacaaataaacaaaataatgctaatgataagtagtatttagtcaaacaaaaatgaaccagtatgacagacaacacaattaatcaggttgtcttgaatattggttcttatttttataattgttaattaggggagagatgatacttaaatagttagttgttaattaggggagagatgatacttaaatagttagttgtttattttgcggatagtgaaatttatttttttcagtcaattactgccaatgtaacttttcagattctagagtgtaaatgtcaatataaaattgtacatgtttaaacaatcaaaagtgtacattattaaattatcatttccatctagagcattgatttaaatccgagtctcaaataataagcaaatgattagcgagtcagtataagggtatacatttgactacagtgaataaaataaaacgttttgttgtataacaaatcgaaaatatattgcaagcgctttatcaaattatttagaaaatttaagttttatgcttgcaatttttgaaatagaatagtactattgcaagtgtaaagaggttaatttttgtcccgcgtgggacttaaaaaggcaaccactggttgtgacatatccttatttacatttataaatataaggaggaggtagtagtgaaagacttattgcaagcacagcaaaagcttataccggatctcatagataaaatgtataaacgtttttctattcttactactatctcaaaaaatcagcctgtcggacgtcgaagtttaagcgaacatatggatatgactgaacgtgtactgcgttctgaaacagatatgcttaagaaacaagatttgataaaagttaagcctaccggaatggaaattacagctgaaggtgagcaactgatttcgcaattgaaaggttactttgatatctatgcagatgacaatcgtctgtcagaaggtattaagaataaatttcaaattaaggaagttcatgttgttcctggtgatgctgataatagtcaatctgttaaaacagaactaggtagacaagcaggtcaattacttgaaggcatattacaagaagatgcgatagttgctgtaactggcggatccacgatggcatgtgttagtgaagcaattcatttattaccatataatgtattcttcgtaccagccagaggtggactaggcgaaaatgttgtctttcaggcaaacacaattgcagccagtatggcacaacaagctggcggttattatacgacgatgtatgtacctgataatgttagcgaaacaacatataacacattgttgttagagccatcagtcataaacactttagacaaaattaaacaagcaaacgttatattacacggcattggtgatgcgctgaagatggcgcatcgacgtcaatcacctgaaaaggtcattgaacaacttcaacatcatcaagctgtcggagaggcatttggttattattttgatacacaaggtcaaattgtccataaggttaaaacaattggacttcaattagaagaccttgaatcaaaagactttatttttgcagttgcaggaggcaaatcgaaaggtgaagcaattaaagcatacttgacgattgcacccaagaatacagtgttaatcactgatgaagccgcagcaaagataatacttgaataagagataaaaagtttaatactttttaaatatcattttaaaggaggccattataatggcagtaaaagtagcaattaatggttttggtagaattggtcgtttagcattcagaagaattcaagaagtagaaggtcttgaagttgtagcagtaaacgacttaacagatgacgacatgttagcgcatttattaaaatatgacactatgcaaggtcgtttcacaggtgaagtagaggtagttgatggtggtttccgcgtaaatggtaaagaagttaaatcattcagtgaaccagatgcaagcaaattaccttggaaagacttaaatatcgatgtagtattagaatgtactggtttctacactgataaagataaagcacaagctcatattgaagcaggcgctaaaaaagtattaatctcagcaccagctactggtgacttaaaaacaatcgtattcaacactaaccaccaagagttagacggttctgaaacagttgtttcaggtgcttcatgtactacaaactcattagcaccagttgctaaagttttaaacgatgactttggtttagttgaaggtttaatgactacaattcacgcttacacaggtgatcaaaatacacaagacgcacctcacagaaaaggtgacaaacgtcgtgctcgtgcagcagcagaaaacatcatccctaactcaacaggtgctgctaaagctatcggtaaagttattcctgaaatcgatggtaaattagatggtggtgcacaacgtgttcctgtagctacaggttcattaactgaattaacagtagtattagaaaaacaagacgtaacagttgaacaagttaacgaagctatgaaaaatgcttcaaacgaatcattcggttacactgaagacgaaatcgtttcttcagacgttgtaggtatgacttacggttcattattcgacgctacacaaactcgtgtaatgtcagttggcgaccgtcaattagttaaagttgcagcttggtatgataacgaaatgtcatatactgcacaattagttcgtacattagcatacttagctgaactttctaaataattttagtatagtttttattcaaatacgctagtgctcagaactatttagcattaattaaagcttatgagtaagcggggagcacaaacgcttctccgcttatttttatataaaatttcctaattacaaggaggaaacaccatggctaaaaaaattgtttctgatttagatcttaaaggtaaaacagtcctagtacgtgctgattttaacgtacctttaaaagacggtgaaattactaatgacaaccgtatcgttcaagctttacctacaattcaatacatcatcgaacaaggtggtaaaatcgtactattttcacatttaggtaaagtaaaagaagaaagtgataaagcaaaattaactttacgtccagttgctgaagacttatctaagaaattagataaagaagttgttttcgtaccagaaacacgcggcgaaaaacttgaagcagctattaaagaccttaaagaaggcgacgtattattagttgaaaatacacgttatgaagatttagacggtaaaaaagaatctaaaaatgatccagaattaggtaaatactgggcatctttaggtgatgtgtttgtaaatgatgcttttggtactgcgcatcgtgagcatgcatctaatgttggtatttctacacacttagaaactgcagctggattcttaatggataaagaaattaagtttatcggtggcgtagttaacgatccacataaaccagttgttgctattttaggtggagcaaaagtatctgacaaaattaatgtcatcaaaaacttagttaacatcgctgataaaattatcatcggcggaggtatggcttatactttcttaaaagcgcaaggtaaagaaattggtatttcattattagaagaagataaaatcgacttcgcaaaagatttattagaaaaacatggtgataaaattgtattaccagtagacactaaagttgctaaagaattttctaatgatgccaaaattactgtagtaccatctgattcaattccagcagaccaagaaggtatggatattggaccaaacactgtaaaattatttgcagatgaattagaaggtgcgcacactgttgtatggaatggacctatgggtgtattcgagttcagtaactttgcacaaggtacaattggtgtatgtaaagcaattgcaaaccttaaagatgcaattacgattatcggtggcggtgattcagctgcagcagcaatctctttaggttttgaaaatgacttcactcatatttcaactggtggcggagcgtcattagagtacctagaaggtaaagaattgcctggtatcaaagcaatcaataataaataataaagtgatagtttaaagtgatgtggcatgtttgtttaacattgttacgggaaaacagtcataagatgacatcgtgtttcatcacttttcaaaaatatttacaaaacaaggagtgtctttaatgagaacaccaattatagctggtaactggaaaatgaacaaaacagtacaagaagcaaaagacttcgtcaatgcattgccaacattaccagattcaaaagaagtagaatcagtaatttgtgcaccagcaattcaattagatgcattaactactgcagttaaagaaggaaaagcacaaggtttagaaatcggtgctcaaaatacgtatttcgaagataacggtgcgttcacaggtgaaacgtctccagttgcattagcagatttaggcgttaaatacgttgttatcggtcattctgaacgtcgtgaattattccacgaaacagatgaagaaattaacaaaaaagcgcacgctattttcaaacatggaatgactccaattatttgtgttggtgaaacagacgaagagcgtgaaagtggtaaagctaacgatgttgtaggtgagcaagttaagaaagctgttgcaggtttatctgaagatcaacttaaatcagttgtaattgcttatgaaccaatctgggcaatcggaactggtaaatcatcaacatctgaagatgcgaatgaaatgtgtgcatttgtacgtcaaactattgctgacttatcaagcaaagaagtatcagaagcaactcgtattcaatatggtggtagtgttaaacctaacaacattaaagaatacatggcacaaactgatattgatggggcattagtaggtggcgcatcacttaaagttgaagatttcgtacaattgttagaaggtgcaaaataatcatggctaagaaaccaactgcgttaattattttagatggttttgcgaaccgcgaaagcgaacatggtaatgcggtaaaattagcaaacaagcctaattttgatcgttattacaacaaatatccaacgactcaaatcgaagcgagtggcttagatgttggactacctgaaggacaaatgggtaactcagaagttggtcatatgaatatcggtgcaggacgtatcgtttatcaaagtttaactcgaatcaataaatcaattgaagacggtgatttctttgaaaatgatgttttaaataatgcaattgcacacgtgaattcacatgattcagcgttacacatctttggtttattgtctgacggtggtgtacacagtcattacaaacatttatttgctttgttagaacttgctaaaaaacaaggtgttgaaaaagtttacgtacacgcatttttagatggtcgtgacgtagatcaaaaatccgctttgaaatacatcgaagagactgaagctaaattcaatgaattaggtattggtcaatttgcatctgtgtctggccgttattatgcaatggaccgtgacaaacgttgggaacgtgaagaaaaagcttacaatgctattcgtaactttgatgccccaacttatgcaactgccaaagaaggtgtggaagcaagttataatgaaggcttaactgacgaattcgtagtaccattcatcgttgaggatcaaaatgacggtgttaatgatggagatgcagtgatcttctataatttccgacctgatagagcggcacaattatcggaaatttttgcgaacagagcattcgaaggatttaaagttgaacaagttaaagacttattctatgcaacattcactaagtataatgacaatatcgatgcggctatcgtcttcgaaaaagtcgatttaaataatacaatcggtgaaattgcacaaaataacaatttaactcaattacgtattgcagaaactgaaaaatatcctcacgttacttactttatgagtggtggacgtaatgaggaatttaaaggtgaacgtcgtcgtttgattgattcacctaaagttgcaacgtatgacttgaaaccagaaatgagtgcttatgaagttaaagatgcattattagaagagttaaataaaggtgacttggacttaattattttaaactttgctaaccctgatatggttggacatagtggtatgcttgagccgacaatcaaagcaatcgaagcggttgatgaatgtttaggcgaagtggttgataagattttagacatggacggttatgcaattattactgctgaccatggtaactctgatcaagtattgacggatgatgatcaaccaatgacgacgcatacaacgaacccagtaccagtgattgtaacaaaagaaggcgttacacttagagaaactggtcgtttaggtgacttagcacctacattattagatttattaaatgtagaacaacctgaagatatgacaggtgaatctttaattaaacactaatattgtaaaagatgttaagtaaacgcttaatgacacttattttttgaaaataatagtaatatcattttgttaaatgaaagaataaagctataataattatagaataactatttaaaggagattataaacatgccaattattacagatgtttacgctcgcgaagtcttagactctcgtggtaacccaactgttgaagtagaagtattaactgaaagtggcgcatttggtcgtgcattagtaccatcaggtgcttcaactggtgaacacgaagctgttgaattacgtgatggagataaatcacgttatttaggtaaaggtgttactaaagcagttgaaaacgttaatgaaatcatcgcaccagaaattattgaaggtgaattttcagtattagatcaagtatctattgataaaatgatgatcgcattagacggtactccaaacaaaggtaaattaggtgcaaatgctattttaggtgtatctattgcagtagcacgtgcagcagctgacttattaggtcaaccactttacaaatatttaggtggatttaatggtaagcagttaccagtaccaatgatgaacatcgttaatggtggttctcactcagatgctccaattgcattccaagaattcatgattttacctgtaggtgctacaacgttcaaagaatcattacgttggggtactgaaattttccacaacttaaaatcaattttaagcaaacgtggtttagaaactgcagtaggtgacgaaggtggtttcgctcctaaatttgaaggtactgaagatgctgttgaaacaattatccaagcaatcgaagcagctggttacaaaccaggtgaagaagtattcttaggatttgactgtgcatcatcagaattctatgaaaatggtgtatatgactacagtaagttcgaaggcgaacacggtgcaaaacgtacagctgcagaacaagttgactacttagaacaattagtagacaaatatcctatcattacaattgaagacggtatggacgaaaacgactgggatggttggaaacaacttacagaacgtatcggtgaccgtgtacaattagtaggtgacgatttattcgtaacaaacactgaaattttagcaaaaggtattgaaaacggaattggtaactcaatcttaattaaagttaaccaaatcggtacattaactgaaacatttgatgcaatcgaaatggctcaaaaagctggttacacagcagtagtttctcaccgttcaggtgaaacagaagatacaacaattgctgatatcgctgttgctacaaacgctggtcaaattaaaactggttcattatcacgtactgaccgtattgctaaatacaatcaattattacgtatcgaagatgaattatttgaaactgctaaatatgatggtatcaaatcattctacaacttagataaataattttctttataatcaaatgctgacataattttagttgaggattattatgtcggtataaattgaataaagtttttgagttcacgcttaaaaagttcacgcttttatttataacctgccacagagttgagactgtggtaggttttttattttgaagtattattcataacagactaataatcatgaggtaactaataacacatatttaacttgtattattaaactggtataataaatttatgttgaaatgaatattgtatgacagggtattcacttttattaaaaggtaaaattaaataaaggttttatagaacgtatttaaatatatgaggagtaaacaaatggctgatagaacgaataaagaaattaaaacaggacgctttattgcaactgcatcaatcgtattctcaatattgttgattattcattactttgtttcgttggataatgcgactgccaaagcattactcaatttaacgaatcaaaacacttcagataaagcgatagattacattttaaacagctttagattcactggtattttgtatattttggcttatctagcaggcttcatcactttttggaatcgacatacttatgtgtggtggtttatgtttgcagtttatgtatcaaatagtttgtttacgttgattaatttatcaatcacaattcaagcaataaaagctgcacacggtgcgtacttaacattgccaattttaattgttattataggttcggttgcattagcgatttatatgcttgttgtttctatcaaacgtaaaagtacatttaatcgctagaaaattgattttaacaatgaaaatatgatatactacttgtcgtatataaggaacggaggacaatttatgcatacatttttaatcgtattattaatcattgattgtattgcattaataactgttgtactactccaagaaggtaaaagcagtggactttcaggtgccatcagtggtggtgctgagcagttattcggtaaacaaaaacaacgtggcgtcgatttattcttaaatagattaacaattattttatcaatattattttttgtacttatgatttgcataagttttcttggtatgtaaggtccggcgatgtaaatgtcgggcttttttatttataattagaataataaaggactcatgttcaattattagaaacatattgtttaattaagtacgtttgttaattgtgaaaaaggagcgttagatttatgcaaataaagttaccaaagcctttcttttttgaggaaggtaaacgtgccgtgttattactacatggttttacaggcaattcgtctgatgttcgtcaattaggtcgatttttacaaaagaaaggttatacatcgtatgcaccacaatatgaaggtcatgcagcaccaccagaagagatacttcaatcaagtccttttgtttggtttaaagatgccttagatggctatgactaccttgttgaacaaggttatgatgaaatcgttgttgctggcttgtcattaggtggcgattttgcattaaaattaagcttaaatcgagatgtaaagggtattgtaacgatgtgtgctcctatgggtggcaaaactgaaggtgccatttatgaaggctttttagaatatgcacgcaattttaaaaagtatgagggtaaagatcaagaaacgattgacaaagaaatgcatcatttcaaaccaactgaaactttaaaagaattaagtgaagcattagatacgattaaagatcaagttgatgaggtgtttgacccaattttagtgattcaagcagaaaacgacaatatgattgatccacaatccgcaaattatatatatgaacatgtagactctgacgaaaaagatatcaaatggtatagtcagtcaggacatgttattacaattgataaagaaaaagaacaagttttcgatgatatttatcaatttttagagtcattagactggtcagaataaaaagagattttaacattagaaaggaggggcataatgaatttaaagcaatcaatagaagagattattaatcaacctgaatatgaacctatgtcagtttcagattttcaagatgcattaggtttaagcagtgccgactcgtttagagatttaattaaggtgcttgtggagttagaacaatcaggattaatcgaacgttcgaaaacagatagataccaaaaaaagcatagttccaaaggtcaatcgaaattaattaaaggaacattaagtcaaaacaaaaaaggttttgctttcctaagacctgaagacaaagatatggaagatatatttattcccccaacaaaaattaatcgtgccttagacggagatactgtaattgtagaaatacatcaatctaaaggtgaacataaaggtaaaattgaaggggaagttaagtcgattgagaagcattctgtaactcaagttgttggtacgtatagtgaagctagacatttcggctttgttattccggatgataaacgtattatgcaagatattttcattcctaaaggtcaaagtttaggtgcagtagatgggcataaggtactagttcaaattactaagtatgctgatggttcagataatcctgaagggcatatttcagcaatattaggacataaaaatgatccaggtgtagatattttatctattatttatcaacatggtattgaaattgagtttcctgatgaagtattagaagaagctgaagcagtacctgatcatattgaaaatactgaaattaaaggccgtcatgatttacgtgatgaattgacaatcacaattgatggtgcggatgctaaagacttagatgacgcaatcagtgttaaaaagttagcgaacggtcatacgcaattaactgtaagtattgctgatgtcagttattatgtaacggaagattcagctttagataaagaagcttatgatagagcgacaagtgtatatcttgttgaccgtgtgattccgatgattccacatcgattaagcaatggtatttgttcattaaatcctcacgttgatcgtttaacgttaagctgtcgcatggaaattgatgcaagtggtcgtgttgttaaacatgaaatttttgatagtgttatacattctgattatcgaatgacgtatgatgcagttaaccagattattactgaaaaggatcctacgattcgagagcagtataatgaaattacgcctatgctagatttagcacaagatttatcaaatcgtttaattcaaatgagaaaacgccgtggtgaaattgattttgatattagcgaagcgaaagtactagttaacgaagatggtatacctacagatgttcaattgagacaacgtggtgaaggcgaacgtcttattgagtcatttatgttaattgcaaatgaaacagttgctgaacattttagtaagttagatgtaccatttatttaccgagtgcatgagcaacctaaatcagagcggttaagacaattctttgattttattactaactttggcattatgattaaaggcacaggcgaagatattcatcctacaactcttcaaaaggttcaagaagaagtagaaggtcgcccagaacaaatggtcatttcaacaatgatgttgcgttcaatgcaacaagcgcattatgatgatgtgaacttaggacatttcggcttatcagctgaatattatacacattttacatcaccaattagacgttatcctgacttaacggttcatcgattgatccgtaagtatttaattgaaaaatcaatggataataaagaagtgaagcgttgggaagataaattgcctgagttagctgagcatacttctaaacgtgaacgtcgtgctattgaggcagaacgtgacactgatgaattgaaaaaagcagaatatatgattcaacatattggcgatgagtttgaaggtattgtcagctcagttgctaacttcggtatgttcattgaattgcctaacacaattgaaggaatggttcatattgcaaatatgaccgacgattattaccgtttcgaagaacgtcaaatggcattaattggtgagcgtcaagctaaagtatttagaattggtgacacagttaaggttaaagtgacacatgttgatgtagatgagcgattaattgattttcaaattgtaggtatgcctttaccgaaaaatgatcgatcacagcgaccagcacgtggtaagacaattcaagccaaaacgcgtggtaaatcattagataaatcgaaatctgatgataaaggacgtaagaaaaaaagcaagcatcgtaaaggtaaaaaccaacgtaataatgataaatcaggtaatagtaagcataagccattttataaagataaaagtgtgaaaaagaaagcacgtcgtaagaaaaaataagcagcaatgaggtgagtatgaatggctaagaagaaatcaccaggtacattagcggaaaatcgtaaagctagacatgattataatattgaagacacgattgaagcgggaattgtattgcaaggcacagaaataaaatcaattcgccgaggtagtgctaaccttaaagatagttatgcgcaagttaaaaacggtgaaatgtatttgaataatatgcatatagcaccatacgaagaagggaatcgttttaatcatgatcctcttcgttctcgaaaattattattgcataagcgtgaaatcattaaattgggtgatcaaacacgtgagattggttattcgattgtgccgttaaaactttatttgaagcatggtcattgtaaagtattacttggtgtcgcacgaggtaagaaaaaatatgataaacgtcaagctttaaaagaaaaagcagtcaaacgagatgttgcgcgcgatatgaaagcccgttattaagcgatttggttgcttaatcgggctatatttgatatagttatatgtgcttttgtaaactgcaaaagtatgatttgtttgatttattatttcggggacgttcatggattcgacaggggtcccccgagctcattaagcgtgtcggagggttgtcttcgtcatcaacacacacagtttataataactggcaaaacaaacaataatttcgcagtagctgcctaatcgcactctgcatcgcctaacagcatttcctatgtgctgttaacgcgattcaaccttaataggatatgctaaacactgccgtttgaagtctgtttagaagaaacttaatcaagctagcatcatgttggttgtttatcacttttcatgatgcgaaacctttcgataaactacacacgtagaaagatgtgtatcaggacctctggacgcgggttcaaatcccgccgtctccatatttgtagcctacaacctttgtggatgtgggctttttttatatgttttttatcttttcttgtgaggaaggttaaattagctgtgttcgttgatatgatagtatctgcttaggttcaaattttcatgaatgaaaaattaatagttgtgtagatataagattttgggttaagggttgaaagaatgtgtgtcaaataagtgtcaaaaaagttgagcttatagttttagaatgtaaattttatttgcaaaattaattaagctaaagaagtatcataaataagagaattaaatatatagtttagaattagaatcaagatttttataaatattatatttttcttttaattgacttaaatttgatatattgtttaaatgtaatgaggaaaagttgtgatagtttcagatggtaaattaaaggttttaatatagctgttttttaatcgatttttaaggatgatatcgtttgcgagtgaacgtatctatttagtgaaatagtaattatagatgggggcgtaatcaatgaatgacttgagtttatcttcatttttgaaacgcagtaacaaatttatgcaattcaattgttttatttgtttgattctaataatagtattttacataattggtatgaatatacaggactttagtgattttcctagtaaagatttaaatcataaagtgacttataattttaatgggtttttggagatatttgttaataatgcttttatagttcctttggtgtcacttatattatcgataataccaataccatatttgtattttattcctacaatttctacaatttattcattgtcggttattattggggttacattttcatataaatttaacgaagggatagctatttttattggtattttgcctcatggtattttagaaatatacttaacaagcattgaactatcaatgttattcttattaaatgcgtatattagaaaaaattcaatgaatttatttagaaaaagaaaagagacattgccaaaattttttgttttattaaaatcaatagtaaagtgttacctgctaatatttttacctgtggcatttttatgcgctttaattgaaattactgttacaccaactgtttacaaatttttaactaatataatatagaacttttaaaagggcatagctaactatgtgtataggtttatttttgatcgataagtattgtttgaaaaatgagttcacgaaaaatgttgcattgtattcgtgaaattatgatcgagtcatttcaaaaatgaccatttcaaaacaacaaaaaagagtaggcgagctactcttttttattatatttaacaattaaattagtatgtcattatgagtgtaagtaagctaatctataatgacaataataacaacaaagattatatcgctgaatgcgagcattcataaatttatacttcatctaaaccactgtggtcgtcatctttttgcttttctttttctttctctcgttcttgttcttttttgtactcttcttcaaattctttttctttcttttctacttcttctcttgtttccgctctatgagaaaaatcttcggttttaagtttactaaatttaaatgatttagaatcaactgttttatcttctgagtatttatggacatttaaattaatgtttccatcacctcttatctcatagataaacatggcttgtgcagttttgccttttttaatttgatcttggttatgttctgtccaatctttatattttttatcacttaaaagataaccatctcttaatttatttactgtatttttatcatcttgagtgatattaatatagtcatgagaaatagaagatggatttaaatctttatcgtcttttttagcagtaatttccattttaaaagcgatatatttctttttctcatctttttcattgatgataaacggttcttttattttagcttcaaatttgtcactaacaatagtatcgcctttaatttttatttccatattttttttgcttttaaattctttaagttcttcatttaattcttcattgtcattttctttctttttgtgactagtgctctctttttttgcactatcttgatgatgtccacaagcacctaagataagtgtacttgctaataatatccccattacttttttcatttaacatgtctcctttatttcgcaaaaatttattttaaaaactctaaacgacttatcgttttgagtaattaaacaaagttgatattttgtgagattctaagatgatattaaataattcttgtaataatgattctatgtattgttgcaataaattaatggaactataattactaatattatattacttttattgatagaaatatattacttttttaaaaaaacttgtaatatatcgaaagatttaaatgtaaaattttgatttgttaagaaattacgtttataaaaataaaaaaattcaacttatttgtatgagatgaatatgtattgaagaagatgtgttattaaattggaaataatgctcaaagatgggagctcttaaaagcgttattgtattctttagtcaatgcaaatagattgccataataataaacgtacttgatggttaaaaatttacttaagactataaagcaaaactttttatatgagcagtcgaatataacgtttaaaatgattctttttggatataaacgattaagtaaaatgatttttcattttgaaattaatcatataaatttcttaagggaagagtgatatcttaatgattaatattatttcagctataggatctattggaacatttattatggctttattttattttgtatcagtttcagttcagctttatcaaatgaaaattagctttctgccagctttaggttttaaccaaattttattagaaagggagggagaacaacttaatataatgaattcggcaacagaagagcatcatcataaagattatattaaactatataatttaggtggcggtgctgctaaaaaaattgcaatagaggttttattgggtaatgataaagtcattcagaaaaagtacgtgaatattttacctagtaaagaagggtacatgttaccaattaataaaaatgtgtacgaagaattagaaagaacgattgagaacaatggttatgaagctgatttgaatgtacgtatgacttattatcataatgtaagtcgcaaacaacaggaagttatattaaaaggtcaaatcgaccgttttaatacttataataataaagaaatttatgatttgcagtttatctaaaaattgatttaagagggtagttgtttattacgaaaaatatcattcaattttaatgaaataatggcgtcattactataaaatattactttatgttgtaatgcatttttctataagatagaactaaaaggaggggcaaagatgcaaattagacaaatacatcaacatgactttgctcaagttgaccagttaattagaacggcatttgaaaatagtgagcatggttatggtaatgaatcagagctagtagaccaaattcgtctaagtgatacgtatgacaataacttagaattagtagctgttcttcaaaatgaagttgtagggcacggtttactaagtgaagtttatcttgataacgaggcacaacgggaaattggtttagtgttagcacctgtatctgttgatattcatcatcaaaataaaggtattgggaagcgattgattcaagcattagaacgagaagcaatattaaaagggtatgattttatcagtgtattaggatggccgacgtattatgccaatctaggatatcaacgcgcaagtatgtacgacatttatccaccatatgatggtataccagacgaagcgtttttaattaaagaattaaaagtgaacagtttagcgggaaaaacaggtaccataaattacacatctgtttttaaaaaaatatgatttcaagctaggattacattaggtagagttcatattaataatacaaattgcttgcaatgaaatcgtgtgttgtcgtttgcaatttttaaaacagagaaaatgaaaaactttttgttgtaaatatttattgtagttaataaaattctaaaacaaattaattgccattatgcaattttggtgtataattgcattaatagagattaaatatatattaaaagggtatacagttaatataaaatgactttttaaaaagagggaataaaatgaatatgaagaaacaagaaaaacacgcaattcgtaaaaaatcgattggcgtggcttcagtgcttgtaggtacgttaatcggttttggactactcagcagtaaagaagcagatgcaagtgaaaatagtgttacgcaaacggaaaatacgagtaatgagagcaaaagtaatgattcgagtagcgttaatgctgcacctaaaacagacaacacaaacgtgagtgattctaatacaacgacaaacactaatagtgacgaaacgaatgtagcgcaaaatccagcacaacaggaaacgacacaatcagcatcaacaaatgcaactacagaagaaacaccggtaactggtgaagttactactacggcaacgaatcaagctaatacaccggcaacaactcaatcaagcaatacaaatgcggaaaaatcagtgaatcaaacaagtaatgaaacgacttctaatgatactaatacagtatcatctgtaaattcacctcaaaattctacaaatgcggaaaatgtttcaacaacgcaagatacttcaactgaagcaaaaccttcaaacaatgaatcagctccacagagtacagatgcaagtaataaagatgtagttaatcaagcggttaatacaagtgcgcctagaatgagagcatttagtttagcggctgtagctgcagatgcaccggctgctggcacagatattacgaatcagttgacgaatgtgacagttggtattgactctggagatacagtttatccgcaccaagcaggctatgtcaaactgaattatgggttctcagtacccaattctgcggttcaaggtgacacatttaaaataactgtacctaaagaattaaacttaaatggtgtaacctcaactgctaaagtgccaccaattatggccggagatcaagtattggcaaatggtgtaatcgatagtgatggtaatgttatttatacatttacagactatgtaaatactaaagatgatgttaaagcaacattaactgtgccggcttatattgaccctgaatatgttacacatactggtaatgtgacattggctactggcataggaaatacaacagcaaacaaaacagtattagtagattatgaaaaatatggtaagttttataacttatctattaaaggtacaattgaccaaatcgataaaacaaataatacgtatcgtcagacaatttatgtcaatccaagtggagataacgttattgcaccggttttaacaggtaatttaaaaccaaatacggaaagtaatgcattaatagatcagcaaaatacaagtattaaagtatataaagtagataatgcagctgatttatctgaaagttactttgtgaatccagaaaactttgaggatgtcactaatagtgtaaatattacattcccaaatccaaatcaatataaagtagagtttaatacgcctgatgatcaaataacaacaccatatattgtagttgttaatgggcatattgatcctaatagtaaaggtgatttagctttacgttcaactttatatggatataattcgaatataatttggagatctatgtcatgggacaacgaagtagcatttaataacggatcaggttctggtgacggtatcgataaacctgttgttcctgaacaacctgatgagcctggtgaaattgaaccaattccagaggattcagattctgacccaggttcagatagtggttcagattctggcagcgattctaattcagatagcggttcagattcgggtagtgattctacatcagatagtgattcagattcagcgagtgattcagattcaacgagtgattcagattcagcgagtgattcagattcagcaagcgattcagattcagatagtgactcagactcaaacagcgattcagattcagatagtgactcagactcagatagcgattcagattcagacagtgactcagactcagatagcgattcagattccgacagtgactcggattcagatagcgattccgactcagacagtgactcagattcagatagcgattcagattcagacagcgactcagactcagacagtgactcagattcagacagtgactcagattcagatagcgattcagattcagacagcgactcagactcagacagtgactcagattcagacagtgattcagactcagacagcgactcagactcagatagcgattccgattcagcgagcgattcagattcagcaagtgattcagactcagatagcgactcagattccgatagcgattccgactcagacagcgattcagatttagcaagcgattcagattcagcgagtgattccgattcagcgagtgactccgattcagatagcgattccgactcagacagcgattcagattccaacagtgactcagactcagatagcgattcagactcagacagcgactcagattccgacagcgattcagattcggatagcgattcagattcagacagcgattcagactcagataatgactcagactcagacagcgattcggattcagcgagtgattccgactcaggtagtgactccgattcatcaagtgattccgactcagacagtgactcagactcagcgagtgattccgattctgattcaacgagtgacacaggatcagacaacgactcagattcatcaagtgattccgactcagacagtgattccgactcagacagcgactccgagtcaggttctaacaataatgtagttccgcctaattcacctaaaaatggtactaatgcttctaataaaaatgaggctaaagatagtaaagaaccattaccagatacaggttctgaagatgaagcgaatacgtcactaatttggggattccttgcatcattaggttcattactacttttcagaagaaaaaaagaaaataaagataagaattaagtaataatgatattaaattaatcatatgattcatgaagaagccaccttaaaaggtggcttttttacttggattttccaaatatattgtttgaatataattaataattaattcatcaacagttaattattttaaaaaggtagatgttatataatttggcttggcgaaaaaatagggtaaaaggtaggttgttaattagggaaaattaaggagaaaatacagttgaaaaataaattgctagttttatcattgggagcattatgtgtatcacaaatttgggaaagcaatcgtgcgagtgcagtggtttctggggagaagaatccatatgtatctgaatcgttgaaactgactgggagtaaaagtacaggtgttacaccagcaatgtataaagaaaatttagaatctttaatatcatctttatcatttgcagattatgaaaaatatgaggaaccagaatacaaagaagcagttaaaaagtatcaacaaaaatttatggctgaagatgatgcattaaaaaaattttttagtgaagagaaaaaaataaaaaatagaaatactaatactaatacatcaaattatctgggattaacacacgaaagatatgagtcaatttataattcattaaaaaatcatcgtgaagaattttcaaaagaaatcgaagaaattaataataaaaatccagagttaaaagaatataacaatgaggaacaaactaaagctgatacggaattaaacactcttgaaaatcaagtactaatgataggttatacattttatcactcgaataaaaatgaagtagaagatttatataacaaattagatatgattcttggttataaagatgaagagagaaaaaagaagagggctaccaatcaaagaatgttcaataataaaaaagaagatttagaaactattattgatgaattctttggagaaattggacaacaaaggccaacatctattccaacattagcgcctaaagaagagaaagaaacaaatactaataatgctaataaattaaaatctgacactgaagcagcaaaaaatgacgaaacaaaaagaagcaagaggagtaaaagaagtttaaatactcacaatcacaaatctgcatctcaagaagtaactgcagaacaaaaagctgactacgaaaaaagagctgaagaaagaaaagcaagatttctagatagacaaaaaagtaagaaagaaccggttgtatcattagaatatgattttgaacataaacaacgtgttgacaacgcaaacgacaagcaacttgttgtttctgcgccaacaaagaaaccgacactacctacatatactgaaacgactacgcaggttccaatgcctacagtagaacgtcaaactcaagaacaaattgtttataaagcaccgaagcaattggctggattaaatggtgaaagtcataatttctcaacaacgcatcaaacgccaataacttcaaatcatactcacaataatgttgtagaatttgaagaaacgtcggctttacctggtagaaaaacaggttctttagttggtttgagtcaaatcgattcatctcatttaactgaacgtgaaaaacgtgtgattaagcgtgagcatgttagggaagctcaaaaattagttgaaaactataaagatacacatagttataaagaccgtttgaatgcccaacaaaaagtaaatacattaagtgaagggcatcaaaagcgatttaataaacaaataaataaagtgtataatggcaaataattaattcatggctgacatataactaatgactttgcctcaaaaataacaacactttaaactagcaataaaataattcaaagacatcatttcaatgatgtcatttagtgtagtccacattctaaacaggtgtggactattacttttttcactttatattacgaaaaaattattatgcttaactatctatattaatcgttaattttaaggtgaaaaacaataaaaatgttaagacaacgtttacttcaagttaattattatactgaaaactctggtatataatgctgttagtgaatataacaggaaaattacattggttataactttgagtctatataaaggagaaataacagatgaaaaagaaattatttgttttaactatgagcacgctatttgctacacaacttatcaattcaaatcacgctaatgcatcaacagaaagtgttgataaaaactttgtagttccagaatcaggaattaataaaattattccagcttacgatgaatttatgagtgcaccaaaagtaaatgttagtaatttagctgacaacaaaaactttgtggcttctgaagataaattgaataagattgcagatccttcagcagcaagtaaaattgtagataaaaactttgccgtaccagaatcaaaattaggaaacattgtaccagagtataaagaaatcaataatcgagtgaatgtaacaacaaacaatccagcttcaaaacaagttgacaagcaaattgtttctaaaggcccagaggttaatagatttattactcaaaataaagtaaaccatcgtttcatcactacgcaaacacactacaagaaagttattacttcatacaaatcaacacatgtacataatcatgtaaaccatgcaacatcttctatccatcaacattttactattaaaccatcagaagcacctagatatacacacccatctcaatctcaatcgttaattataaatcatcattttgcggtgcctggataccatggtcataaagttgtaacaccaggacatgctagtattagaattcatcacttttgtgctgtacctcaaataaatagttttaaggttattccatcatatggtcacaattctcaccgcatgcatgtaccaagtttccaaaacaatacaacttcagttcatcaaaattctaaagtaaataaaacttataactataaatacttttatacttataaagtagtcaaaggtgtaaaaaaacatttctcattttcaaaatcacacggttataaaattgttaaaccagcattaaacatcaaaaatgtaaattatcaatatgctgttccaagttatagccctacacactacgttcctgaatttaagggtagcttaccagcaccacgagtataaattttggcactaagtttacgagatatgataaatacctattattttaaatatagtctgcaatctatgaggttgtaggctatgttttttgcagtttatcaataaacacccatcaacaaattataccttttttctacttagaaagttgaaaagtaacgcaatcttaaataatcattttattaattaatataaatataagactcaaaataatagttaatagtttgtttatcgcaagttaattattgtttctaaaatattggtatataattttcaatggcgaagaaaacagggtaaaaaagtcggtttttaaatcaaagcaaataagggagcataaacaaatgaaaaggaaagtgctagtactaacaatgggtgtaatttgtgcaactcaattgtggcattctaatcacgcaaacgcattagtgacagaaagtgttgaaactaattttgttgtaaaagattcggataataaaaattttttacaaacccatactgaaattactactgaggagaaattttcaatagtagaaaagagtcaattaaatacactaaaatcactatctaatgacaactacatagaatatgatttacatactaatcaaactggtagtaaaaaaggttggttatatggctatagtgaaattgactcatcacatttcacagaccgtgacaaacgcgctatcagacgtgatcatgttaaagaagcacaaaacttgattaatgattataaatatacacaaaaatatgaagactttgctaaagctactgcaaaggtaagtacacttagtctgtctcatcaaaattatttaaataaacaaattgataaagtgaataataagatagagaaaactgaaaaaccctaatccaaagtaatttataagttatatatctcgtttttaaatgacaatttatccccgtaaatataataaataatcttttcaaattccgcatagatatagagacgccaataaacctctttgtctcgatataatagtctgcaacgattcatgttgtaggctttttaattttacaaataaggctaaatatataagttctgacacctaaaatatagaaaatacataaaagtaagtatagttattttactataattattaaatttttattaattaattgtaaaaatgtagaattataattaattaacgtttaatattaaaattaactaaaaagaaagaggtgttagttatgacagaatacttattaagtgctggcatatgtatggcaattgtttcaatattacttatagggatggctatcagtaatgtttcgaaagaacaatacacaaagaggtttttctttttcgctactagttgcttagtgttaactttagttgtagcttcaagtctaagtagctcagcaaatgcatcacaaacaggtaacggcgtaaatagaagtgattctgaagatccaacagtatacagtgcaacttcaactaaaaaattacataaagaacctgcgacattaattaaagcgattgatggtgatacggttaaattaatgtacaaaggtcaaacaatgacattcagactattattggttgatacacctgaaacaaagcatcctaaaaaaggtgtagagaaatatggtcctgaagcaagtgcatttacgaaaaaaatggtagaaaatgcaaagaaaattgaagtcgagtttgacaaaggtcaaagaactgataaatatggacgtggcttagcgtatatttatgctgatggaaaaatggtaaacgaagctttagttcgtcaaggcttggctaaagttgcttatgtttataaacctaacaatacacatgaacaacttttaagaaaaagtgaagcacaagcaaaaaaagagaaattaaatatttggagcgaagacaacgctgattcaggtcaataatgctcattgtaaaagtgtcactgctgctagtggcacttttataatttttagatcacgatatgatttattatccattcagaattaaaaaagtaaatagtatcaaaagcaagtgtatttaatattagaaaataaaaattttaaatttagtattaaaatggaatattactatatatttcaatgtgtattatcacagaaaataaaataatgctttacttctatatttaaaagtgtataatgaaagttaagtaataaagagcgtgaagaaaaatgtgagttatttatatagaatattctccttttcatttatgaatttgttacaaaatatttagtgcaaaagcacgacggaggtattcaatatgaataacggtacagttaaatggtttaatgcagaaaaaggttttggtttcatcgaaagagaagatggtagcgacgtattcgtacacttctcagcaatcgctgaagatggatacaaatcattagaagaaggccaaaaagttgaattcgacatcgttgaaggcgaccgtggcgagcaagctgcaaacgtagttaaaatgtaattttaacttattcaaacagtccttattatagggctgtttttttatgctttaaatcgatagcagttggtgtggtaaaagcactagctgttatttttttgtccaataaatttaggtgaagatctaacaacatataatggttctaaaataaatcgaactgatggaaaagttttttacttttgatctgtccgacttttgattttgaatataaaaaaagcgccaatacagaactttaataatgacgagaattaaagtctgtatatggcgataacaagaagtaatgttaaacactcaaaatgtttaacaataataggataccacatcgcataatatcttactacttaattaataatttaactaatcaactttttgttaattttttattaagactgattaattattgagaatatttattgtttttaaaatctcataataattcagtaatcttgttttcatttaaaaggcgaaatattaaaataattaaataaaaatattgtgtttaatttacagcgtcaaatatacttatttctaatgctttggggtctactgaaacaagtagagaatgatcgatgttactaacattgccattctccaaatctatttctgtgagtatttggaagctaccattaggcaacggtttaacaatagacaattgcttttccgcttgttgtattaaaaaaggttttgcagattgattattaatatgccattcactcatgtatattttcactcctgatttaaaatagggttagaaagtttatagttgagacattcatgttcaaccaaaattttattcaaattcaataaatgtcttgtttaaaatagaaatattgtaaatgttatcgtccaaaacttcaccagttaagtatttgttttgaattaaaatttggcagttagttaagaagtcttgataatcacgatcgcaaaaatagttttcacgtgcatctttagcatcgccaaaaaagttagcgactgtttctgtttctccattattcgaacgttcaatatataatttgtaaaatttagctattgtatacttttgttctttagttagttcattcaaaatattgggcctcctgaaatatcatttgtaatctatacccaatttattgcaaaacacaaactaatttaactatttgatgaaacggtgttaataagctttaacaagccttagtttatatggatctataaaattatctttaattgcatagggtgaaataatatgtagtccataacttttaactgatttttcacttacaccaaatttataagcttgatagataattttagtacaatacgtaaattttttgctgttcaaatttaatgtaactagataacgatgatttgtattttcatagtttttcttaacccagtcagccgcttttttacctgcaccaggatagctgcaacgataaactttcatccaatcatttttgccacttgcataattatatttaaaagattcgaaggattgtgtagttggtttgtcgccaggcccctcaatttgcaaaatcgttttatcatcaatcgcgatactacaatgaccaaaaaatccccacatgacaggcccttttgtaataataatatcaccaggttgtaattggaatttgtcatcttgaatttctgaatacttattatctgcaattgtttttggtgagtttataggggatacgacaacgaataatataagtacaattatcgttcgtttaatatagttcacttaaaagctccttgttgaagaaatatatgtaaatagtcttaaattagaattgtaatctttaataagcttgtaagactaaaacatatcttaaatattaaagtatgagagtgtgaaatgtctattaagaataaaaaacagtctgaaacatctttgagacgtttcagactggatataaaatgaatttcatttatagcacaccaaatataaatgtgtatattaatatagcgaatccaaaaatatagagaatgacagtgaaacttaaataggactcttttttagattctttgccagtttttttcattaatacgagtataaacgtagcggcaactaagaaaattaatgctagccaaaacagaattgcaaaatgtaaagacatgtgaaaccctccttatataccgtaattattaacctataaaactataaaaaataggataaatgtaatagagaacgagtacgatatttataaaaaataatatttcacttaaccagtttttagttatcattgcaatggtaaaggatactatgagtatcacaccacaaatgataataccaggcaggagccaacataaatcatctaaatctttattatatgtgattaaaatattaaagataacaaaagtggtagtaataactatattgatagcatttaacaaaatgttattcatgactgacacctactagtataaaaatagcttcttaataaatatgataacactattttccaataggtaaataaaaagtatagttatttttaaattattatttgtagaatgctaaagtttattaattcaaacaagtgagcatatataggggtgtatagtattaatatgaaaagaatatttgtatactaaaaacccttaaagttgtataattcgttaatatttttagaatcagataacaaaaaaatgtgcaaaatcacttttgcacatttacaaatactagttttctgataagattaataataacactttaaatagcgcttaataaatgaagggggcaggtcttatgacgttttacaatttcatcatggattttcaaaatgataacacaccatttggtatattggccgaacacgttagtgaagataaagcattccctcgattagaagaaagacaccaagtaattagagcatatgtgatgtctaattacacagatcatcaattaattgaaactacaaatagagctattagcttatatatggcaaattaatttgagtagtaccaattatgatgtattagtgcatcccaaatatcttttgttttaaagtttatttcatcatttcttatcgaaaatggtgtaataatgtctttatctaaccaagtgtttataagttcatttggtacaccatctaacaacatttcacttttactaattataaaacattcccagtcaagtgaaacattttgtggattcacataattacattgattatgattatccataaatactcactcctttaaaattctgtactcttcattgcattttaccccgtcacattatcttttaaactaaaatcatcattacttatgaaaaaatgtacatcaaaagcaatggttttcgctaccgaaaaagtttaaataatggtttaatatatttggtactcattttaataaaaagagaatacattttgagttatcaatactttttattgaagaggtgttattgttggctaaaacgttatatttaatgcgccacggacaaactttgtttaattttaagggactaattcagggatttggagattcgccgctaacagaacttggaatcgctcaagctcaaaaggcacgtagctattatgaaactaaggggataaacttcgatttatatgcatcatcaacgcaagaacgcgcaagtgacacacttgaaaatgttgcacctaaccaatcgtatcaacgttttaagggactgaaggaatggcattttggattatttgaaggtgagtcagtctatctatttgataatctatacaagcctgaggacttattcggagatcgaattgttccttttaaaggagaggcaaggcaacaagttgaagatcgcattgtgaaaactttacatgacattatgtctcaaacaaagaacaatgcattagtcgtgagtcatggaacaataatgggagtatttttaagatattgccttaaactagatgaagcattaaagcataatatcggtaattgtaatatactgaaatttgaatatgacaatggaacatttaaatttgttgagttaattgatccaaatttataataaataaagcgttatacatggacacaagtatgtcttttgtataacgcttttaaaatactactatataacgctttagaataataattgaataagtttttgtaatatcatcagagcaacaataataattattatgcttgatattttattgattattgttaataattttccggttttatcaattgatccaatcatttttcctaaaattgcgagtaaaaagaaccataaccatgaaacgctaatacaagcgattgtaaacgcaattttattgctgccactatataatgcagcactactaccaattacaccaattgtatctaaaatagcatgtggattgagtaatgaaaccgataaagcaaaacttacttgtttcattggagatataatttgagcttctccatctgttgagggtttatcatgccaaatggtccaagccatatacatcaagaaaattaaaccaactatataaataattgcttgaagtacaggtaaagacataataatgatagatactcctaccactgcaataataataagtaagctgtctgacaacccggctgtaattattgcaggcaatacatatctatattttggttgattagctccttggttaaaaataaatacattttgtgcacctaaaggtaaaattagaccaatcgctaagataaatccatgaataattgcggttaccattaagttttgacacccctaaaacatagaatattctgaaaaaacttattgatatcatatcaaataaaaaacaactactcaatagtaaagtagttgtatgaaaaataggttgatatatgatttgaatttatgagaaatgtagaatatataaaactgtattacttattaatcaaatcataaaaaagccaatgttcatcgaaataggtatttccgatttttattgcatttttctcaaaaccaagaatgtcgaatcctagtgcactatagaaaactttagcacctatgttgtttgacacaattgatgtaagtaaagattcgtaattgttctgccgtgcataattaataatgaaattaatgagctcgctattaatcgatttatcgttattagtaacaaagttgtatttaattaatgatttatgttcttttccaacgtatcgaatttgttctaaggcagctgttgcgataagtgtttcgttttcataacagccaaatacaatacatttcggtgaaccttgatttaaaatgtcatgtattaaggtgtcagtcattgtttgactataatgtgaatcttgagtgaattcttcattgactgtcgaaacaagtctcttatactcattaaaatcattattcgttaatgttttaatttcaatcattactgacctccttaatcattattaagaaagattttgtactaaaaaaatttcttaattacatattaaaatgtttattaaaattttgcaatcattgatttatatgcacattcttgtaaatggattatcaatttaattatatttatttttaagttcagggaattatggaattggttattggtcgacactggacttttatttgtagacggtatgcgaagaagtcaagccagtattggaaccggtcacatttatgatgactaagggacaatcattttcagttaaatattgccagaaatttcaatcacgattagaaaaaataaccaaccaaaaatttttggttggcaaatttgaattttatgtgaattttattaataacgttgaataatcactttaagttaatgttaatctacaacatttacaattaaatcgacattaatatttccttgagtcgcttttgaatatggacaaaattcatgagccatttgtaaatatttttcagcttcttcttgagatataacatttttaattgtcgcatcaattgaaacacttaatttaggactttctgagtctggatcatcttctagtctcactgttagtgttacttctggatgagcatcacgcactttgttttgctttaaaattaggtcgaaggcaccgttgaagcaagatgcataacctgctgcaaataattgttcggggttagtagctttaccatctgcttgagcaggcggaacgatatcaatatctaatgcttgatcatcagtataaacatgtcctttacgtccgccaacattcgtcgctttagtttcataatgtattgccattcttataacctcctaatttaaaatacatttatgctttacccattcgaaaataccttaatcattttcatttatagcattgtttgattgaaggataaaaagttgttgtttacaataaaaataatgagtatctgaaatgagggatttactatgacacatgtggaagtagtagcgactatcacgccacaattacatatcgaagaaactttaattcaaaaaattaatcatcgtattgatgcaatagacgtattagaattacgaattgatcaaattgaaaatgtcacagttgatcaagtggcagaaatgattacaaagctgaaggttatgcaagattcatttaaattattagttacgtatcgtacaaagttacaaggtggatatgggcaatttacaaatgactcgtatcttaatttaatatcagacttaacaaatatcaatggcatagatatgattgatatagaatggcaagcagatattgacattgaaaaacatcaacgaatcattacacatttgcaacagcataataaagaggtgattatatcacatcataatttcgaaagtacgcctccgttagatgaattgcaatttatattttttaaaatgcaaaagttcaacccagaatacgttaaattagcagtaatgccacataataaaaatgatgtgttaaatttattgcaggcaatgtctacattttcagatactatggactgcaaagttgttggtatttcaatgtctaaacttggactaataagtagaacggctcaaggcgtttttggtggtgcgttgacttatggttgtatcggagaaccacaagctccaggacagattgatgttactgatttaaaagcacaagtgactttatactaataaaatgaattaggttgcttttgtgtaagtgctgtcttataattgagaagtattatcattgttcgtggaggagcgattttagatggaattacaacaagcaatagctaatagaagaagtgtgaaaaaatttaaaagagatatgcacatagatgacgcattgctatatcaagcaattgagaaagctgctgatgctccaaatcacggaatgagggaaccatggagagttgtgcatgttccgaaagacagattaggagatatgagtaaggatatttctaaatttgcatttcctaatgaattagataagcaacaatgtcattatgatgcagtaacgaaactaggtggcatgttattgcttattttaaaaacagatccaagacaacgtcaaaatgatgaaaactactttgcatttggtgcatatgcacaaaatcttatgttgttactttatgaagcgggaataggtacatgttggaaatcgccattatatatctatgatcctaaagtaagaaaaacacttggtataaagaaagacgaagttcttgctggattcttatatttaacggatttagaagaagatatgcctaaagcaccacgtaaaaatagaaacttaattacattatattaatatgtataattatagaaacattaataaaagctgagacgtgaattgatggacatctatcgagttagagatttaatctaacttactagagtcggtacaatcacagtctcagctttttattgtgcagtataaactcatttttattttagtatttatttaaaagtttctgctaaaaatgattcaacttgttcaggtgatttagcatttgctgaatgaaggtgtgcaattttgtcaccgtttttaaatactagcaagctagggatacccataacttcattttcaacaacgacatcttctaattcatcacgattgacagtataccattgataaccattatattgttcaacgattggatcaatccacatatccatcgcacgacaatcagggcaccatcctgcctcgaatttaacaattacaggtgtatcgctattaattacagatttaaatgattcattacttttgattgcttgcattataacaactcctctagatagtttaataatttttattatagctaaatttatatcataataaaaaattttagcttcaaaatgaaagccttttgctatggaaaatgatatatttatgttaaatacataaaggaggttgcagtcgtatgattaaattttaccaatataagaattgtacaacttgtaaaaaggcagcaaagtttttagatgaatatggcgtaagttatgaaccaattgatatcgttcaacatacacctacaataaatgaatttaaaacaataattgcaaatacaggcgtagaaattaataaattgtttaacacacacggtgcgaaatatcgtgagcttgatttgaaaaataaattacaaactttatcagatgatgaaaagttagagttgttatcatctgatggtatgttagtaaagcgtcctctagcagtcatgggtgataaaataacattaggattcaaagaagatcaatataaagtgacttggttagcgtaagcataatgtaaacgtttactaaatatctcgaaatttagattcattacatgtaaaatgaaataagctatacaattgttaatttttataaatatagttgaatagcatctagccttatggcatcattaatgatgtaaagattaattaggaggggattctcttggcagtaccaaatgaattgaaatattcaaaagagcatgaatgggttaaagttgaaggtaatgtagcaacaatcggaatcacagaatacgcacaaagcgagttaggtgatattgtttttgttgaattaccagaaactgatgatgaaattaatgaaggggatacgtttggtagcgtagaatcagtaaaaactgtatcagaattatatgcaccaatctctggtaaagtagttgaggtcaacgaagaactagaagatagtcctgaatttgtaaatgaatctccatatgaaaaagcatggatggtaaaagtagaagttagtgatgaaagtcagcttgaagcattattatcagctgaaaaatacgcagaaatgattggtgaataatcaccgtatgactccttaatctaagattgaggagtttatttttagtctgagtaagtaaataatatgaaagaagatttattaggtactattatttggagcactggtagattttattattcaagaatgatgaaaatactgaatttagctattttaaaaataaaaattgggggagttaatatgctaaacattcaagacattagtcatctttctaaaaaggagcaaaaagcatataagcgtttcgtagaatctgtagaaaacggtaatttaccagtactaccatgtattgaaatggatctaaaagagatgcaagaagaaacattaaaccagagtaagattggtggaatgccatttttaaaatcttttaaagatataccattagatgaaaataatgtaccaatggtattgttagcacagattaatttgaatgatcttccagaacaacaagaattatttcctgtaaatgtagggatattgcagttttggattagttcagaagatcaaatgtatggtatgtctgaaaatttaaagggaaacaatataaactcaaggcttgtttatataaaagagccaatttcaaatttatcactcgaaaatattcaagcgcatttgaagtcattaaatgctgataatgaggatatcccgttcagtggagcattttctatagaatttagattgtcgaaacaaactattacatgtactgattataagtatgatgaggacgtgcttgcattgtggaataaagtcaatccatccttcgcactaaaatcaatgtttgatggatatgatgaattaatggaacctgtgtgtaacacatttactgctaaggaaccatttaatcaacttggtggttatccatattttgaccaaatagatccaagaacgaacaatcaagaactgaaaatgtatgatagagtcttactgcaaattgattctacaagagatggtaattcttcgattatatggggtgatttaggtattgccaatatcttagtaaaatctactgaccttgaggctatgaagtttgatgattacatgtattcatgggattgcagctaagagaatcataaaaatatattactttaataagtgtagtatctatagatcaatctagggagtgggacagaaatgataaggtagtgggacagaaatgatattttctcaaaatttatttcgtcgtcccaccccaacttgcacattattgtaagctgacttttcgtcagcttctgtgttggggccccgcccaacttgcattgtctgtagaatttcttttcgaaattctctatgttggggaccaccccaacttgcattgcttgtaagctgacttaccgtcagcttctatgttggggccccgctataattgaaaaatgtttgttataagtgtattttcttttggttaactgttggtaatataatattgtagattttaggatgttgatttatggtttaatcattgtctgcttatgtaaaatgtctcatctagtaaaacagggtttttgtaatcattatattaagctagtttaaattttttgtgatttatgttttattcataccaattttgtgaaatgatacagtgacagatgtttattgattttaaagggtgatgatgatggctattgtaaataaagtgataattgttgaaggaaaatctgataaaaaaagggtgcaacaggttattgcagaaccagtcaatattatttgtactcatggaacaatgagtatagataagcttgatgatatgatagaatcactatatgataaacaagtttttgtattagccgattctgatgacgaaggagatcgaattagaaattggtttaaacgttatttgagtgaaagtgaacatatatttattgataaaacttactgccaagttgcgaattgccccaaacaatatttggcgtatgtactttcaaaacatggctttacttgtaagaaagaaacacctttcttaccgaatataaataatgaaaggttagttttagtaaatgaataattcattagacatcaaagatgtaactacattttatgaggaagacaaacatttaatctttggttatacaccaacttgtggtacttgtaaggtttcagaaagaatgttagacattgctaatgaaatattgcagttgtcattattgaaaatagacttaaacttttatcctcagttttgtaaagatatgcaaatcatgtctacgccgattttattgttgatgaataaagataaagaagtaaaacgaatttatgcatttcaatcggtgactgatttgttagaaaatttaaaatagttattgacgaaattttactaaggtgttaggattaatacaaattaaatgatgcgtaaactcttatcgagagtggtggagggatgtgccctacgaagcccggcaaccgtcttatatagaaatggtgccaattcacataaagttttaacttttgaagatgagagaaacaatactactattgctttctcaatttttctatcgatattgagaaagcattttttattttattaagcaacacagggaggaatcaacgtgattgaattaaaagaagttgttaaagaatatcggactaaaaataaagaagtccttgctgtagatcacgttaatttatcgattcaagcaggatcgatttatggcgtcattggtttttctggagcaggaaaaagtactttgattcgaatgtttaatcatttagaagcgcctacatcaggtgaagttattatagatggagaccatataggccaattgtccaaaaatggattaagagcaaaaagacaaaaagtaagtatgatcttccaacattttaatttgttatggtcaaggactgtgttaaaaaatattatgtttccgcttgaaattgcaggtgtccctagaaggagagcaaagcaaaaagcattagaacttgtcgaactcgtcggtttaaaaggtagagaaaaggcttatccatcagagttatcaggtggacaaaagcaacgtgttgggattgcacgagcgttagctaatgatccaacggtcttgctttgtgatgaggcaacaagtgcacttgatccgcaaacaacagatgaaattttagatctactactaaaaattagagaacaacaaaatttaacaattgtactaattacgcatgaaatgcatgtcattcgtcgtatttgtgatgaagttgcagttatggaaagtggtaaagtgatagaacatgggccggtgacacaggtttttgaaaatcctcaacacactgtgacaaaacgatttgtgaaagaagatttaaatgatgatttcgaaacatctttaacagaattagagccattagaaaaagatgcttatatcgttagattagttttcgctggttcaacaacaaccgagcctattgtatctagtctatcaactgcctatgatattaaaattaatattttagaagcaaatattaaaaatacaaaaaatggaacagtcggctttttagttctgcatattccatatatttcaagtgtagatttcggaaaattcgaaaaagatttaattgagcgacaagttaaaatggaggtgttaagacatgggtaaatcatttagtgaaattataaatgaaatgattacaatgcctaatattcagtggccagaagtttggactgcaatagtcgaaacactatacatgacggtcgtctcaactatatttgcatttatactcggtcttattttaggtgtgttattattcttgtctgctaaaggtaagtctattggcgcaaggctattttattctattgtttctttcattgttaacttatttagagcgataccatttattattttaattttattattaattccatttacaagtttgatacttggaacgataagtggtccgacaggtgcgttaccagccttgatcattggcgcagcgccgttttatgcaaggcttgtagaaattgcttttaaagaaattgataaaggtgtcatcgaagcggcctggtcaatgggtgctaatacttggacagtaattcgtaaagccctcttacctgaagccatgccagcattagtttctggtattacagtaactgctatcgctttagttggatcaacagcggttgcaggtgtcataggtgcaggtggtttagggaacttggcttatttaacaggttttactcggaatcaaaatgatgtgattttagtatcaacagtctttattttaattattgtatttataatccaattcattggtgattggcttacaaataaacttgataaacgataaattgggggtttcattttatgaaaaaattatttggttttattttagtattaacatttgcagttgtattagcagcttgtggtaatggagacaaaggtggtagtgatgataagaaaattactgtaggcgcatcaccagcgccgcatgctgaaattttagaaaaagcaaaaccattattagagaaaaaaggttacaaacttgaaattaaaacaattaacgattatacaacgcctaataagttactagataaaggtgaaattgatgcaaactttttccaacatacaccttatttaaatacagagaaaaaggataaaggttataaaattgttagtgccggcaatgttcatttagaacctatggctgtgtattctaaaaaatataaaagcttaaaagaattaccaaaaggcgcaacagtctacgtatctaataatccagctgaacaaggtcgtttcttaaaattcttcgttgatgcaggtttaattaaaatcaaaaaaggcgtaaaaattgaagatgctaagtttagtgatattacagagaataaaaaagatattaagtttaataataaacaatcagcagaattcttacctaaaatctatcaaaatgaagacgcggatgctgttatcattaattcaaactttgcaatcgaacaaaaattaaatcctaaaaaagattctattgctgtagaaagtgcgaaagataatccttatgcaaacttaattgctgttaaagaaggacatcaagatgataagaaaatcaaagcattaattgaagtattacaatctaaagatattcaagacttcattaatgaaaaatacaacggtgcagttattcctgctaaataattattaatggctcagtaacgtggtgttgctgggctttttaatttaaacaggtatttatatgaaatttaggaatgagatgctattacggataaagtaaaatcctatatgcatgcgtgctactcatttattcttatttttaatttcacatggatagtgactactacatcataaatcattagtgattctttattatttctgtcccactccctcaagttaatgatgaatctatttcgctagttataaaatgacgtcaaatcaatatcaaaatttatttaagtaaaatgtttagataatttttcagtgggtaagtattatatataacatttaattattccgaggaggcatttattatggcagacgaaagtaaattcgaacaagcaaaaggtaatgttaaagaaacagtaggtaatgttactgataataaaaatttagaaaacgaaggtaaagaagataaagcttctggtaaagcgaaagaattcgttgaaaatgcaaaagaaaaagcaactgattttattgataaagtaaaaggtaacaaaggagagtaattttactttttattcctaatacactgcacatgccacttagtcggtataaccatcggctaggtggttttttgtattataaaagtggataccaaaatttattaataattattttaatgttagaaaaaaactaaataaaaactcgctaatgatatccaataatatgtatacaaaacaagacatatattgcatatgattaacgagcaactgaatatattttagcacccctaaaatgattattcattttcagcggtaattcgacctaaagtcaaacttacaataaaaccgatgataaatactactaatgaaacgaaccacatcacgatattagttggtaaacctggaaatactgcaaagagggagccaacaacaaaaccaatgattaatgcaaaagtcattagtttatgatgtgttaggaaatactggataattttgcttgaaataatgaatccagcaagcacgccaaatccgactgcaagtaatataggaagaccggtaaagttaagtttaacaacttcagatatggctagcatgactgtgccatagacgccaaatactaataacataaatgaccctgaaatacctgggagtaacatagcacttgatgcacacatacctgcaataaagtatttaataataagaccagttgatagagtaagtgtttctccagcatgtttatcgccattattcattaatgtaataacaattaagatagcgataccagctataaccatcatgtaatgtttagttgtaaatgacgttttatagttagaaattttcaataaatatggaaggataccaatgattaatccaccaaagaaaaacatagttggaatatggtgttggcttaataaataattaaagagattacttagtgatcccattgccagtaacattccaattataatggggattaaaaaagtaaaacttggccaaaaacgtcgggagaaaatgccgctaattgaagcgataaattgattgtatatacctaacaacaatgcgatagtaccaccgctaacaccaggtaccaagtcactcgttcccatagcaaaaccttttagaatattaatccatttaaattgttgcatgaataactcctttcaaacgattggaataaaatcataaatagcatcataccatattacaaatgtcctagtgaaatgataacatattttaaattcataaaatccattgagaaattatgtgcacttattatcatttatatttttaaagagagcggattagagttgtactttagagttattaaaaataataaaaagggtttaagttgtttatattaaggtataagtaagttataattaactgaacgcattattacaaagtctttttgactacaaattaaaattattataaactagttaagaaaactttatattttacggagggaatataaaatggcatcaacattagaaatcaaagacctacatgtgtctattgaggataaagaaatcttaaaaggtgttaacttgacaattaacactgatgaaatacatgcgattatgggaccaaacgggacaggtaaatcaactttatcatctgcaattatgggacacccaagctatgaagtaactaaaggagaagtacttttagacggtgtaaatattttagaattagaagttgatgaaagagcaaaagcaggattattcttggcaatgcaatatccatcagaaattacaggtgttacaaatgctgatttcatgcgttcagcaatcaatgcgaaacgtgaagaaggacaagaaatcaacttaatgcaatttattaaaaaattagataaaaatatggattttctagacatagataaagacatggcacaacgttatttaaatgaaggtttctcaggtggagagaagaaacgtaacgaaatcttacaattaatgatgttagaacctaagtttgcaatcttagatgaaatcgattcagggttagacatcgatgcattaaaagttgtatctaaaggtattaaccaaatgcgtggggaaaactttggtgcattaatgattacacactatcaacgattattaaattacattactcctgataaagtacatgtaatgtatgctggtaaagtcgttaaatctggtggtccagaattagcaaaacgtcttgaagaagaaggatatgaatgggttaaagaagagttcggttcagctgaataatcttattaatacagtatccatgagatgttcatctatatatgatgaaaatgaacatttatacgaaatagtaaatttcatcaagtaggaggaaaaagttatgacaactgatattttgaacatttctgaagaacaacttgttgattattctaaagcccacaatgaaccttcttggatgacagaattacgtaaaaaagctttgaaattaacagaaactttagaaatgccaaaacctgataaaacaaaattaagaaaatgggattttgattcttttaaacaacacgatgtaaaaggtgatgtttatcaatctttatcacaattacctgagtcagtaagagaaattattgacgtagatcattctaaaaacttagtaattcaacataataatacgattgcgtacacacaagttgatgataatgcatcgaaagatggcgttatcgttgaaggtttagcagacgctcttatgaaccatagtgatttagtacaaaagtactttatgaaagatgcagtaacagtagatgaacatcgtatcacagcgctacacacggcattagttaatggtggcgtatttgtttatgttcctaaaaatgtagttgtagaacatccagtacaatacgttgtgttgcacgacgacgaaaatgcaagtttttataaccatgtcatcatcgttactgaagaaagcgccgaagtcacatatgttgaaaattacttatcaaatgcatctggtgaaggaaatcaattaaatattatttctgaagtgattgctggtgcaaattcaaatatcacatatggctcagtggactatatggataaaggctttacaggccatatcattcgacgtggtattactgaagcggatgcctcaattaattgggcactaggtttaatgaatgagggtagccaaattattgataatacaaccaatttatttggtgatcgttcaacaagttcacttaaatcagtagttgtaggtacaggcgaacaaaaaattaatctaacatctaaaatcgtacaatatggtaaagaaacagatggttatatccttaaacatggtgttatgaaagaacatgcatcatctgtatttaatggtatcggctacattaagcatggtggaactaaatcaattgctaatcaggaatcacgtgtattaatgttatctgaacatgctcgtggtgacgcgaatccaattttattaattgatgaagatgatgtacaagctggtcatgctgcatcagtaggtcgtgttgatccagatcaactttactatttaatgagtcgtggtatttctcaaagagaagcggaacgtcttgttatacatggtttcttagatccagtagtacgtgaattacctatcgaagacgttaaacgtcaattgagagaagtaattgaacgtaaagtttctaaataatattttgaaaataaaagtttgtaatagatatagactgtcgatattggtataagactaatacaacgtcagtatttaaatgattaggatttttatttaagaaaggtcgtgaatgaagtggccgaacactcatttgacgttaatgaagtaatcaaggattttccgatattagatcaaaaagtcaatggcaaacgtttagcatatcttgattcaacagcgacaagtcaaacgcctgtgcaagtgttaaatgttttagaggattactacaagcgttataattcaaacgttcatcgtggtgttcatacattaggatcattggcaactgatgggtatgaaaatgcccgtgaaaccgttcgtcgttttattaatgcgaagtattttgaagaaatcatttttacacgcggaacaactgcgtcgattaaccttgtagcacatagctatggtgatgcaaatgttgaagagggcgatgaaattgttgtcactgaaatggaacatcatgccaatattgttccttggcaacagttagcaaaacgtaaaaatgcgacattgaaatttataccaatgacagctgacggtgaattaaacatcgaagatattaagcaaacgattaatgataaaacaaagatcgtagctattgcacatatttctaatgtactcggtacaattaatgatgttaaaaccattgcagaaatagctcatcaacatggtgcaattatcagtgtcgatggggcacaagcagcaccacatatgaaacttgatatgcaagaaatgaatgctgatttttatagttttagtggtcataaaatgcttggaccaacaggtattggcgtattatttggtaaacgtgagttactacaaaaaatggaaccgattgagttcggtggcgacatgattgattttgtaagtaagtatgatgcaacatgggctgatttacctactaaatttgaggcgggtactccattaattgctcaagcaattgggcttgcagaagctattcgctatttagaacgcataggttttgatgcaattcataattatgaacaagaattaacgatatatgcttatgagcaaatgtctgcaattgaaggaattgaaatttatggcccgccaaagaatcgtcgtgcaggtgtaataacgtttaatttacaagatgtacatccacacgatgttgctacagccgtagatacagaaggtgtagcagttagagctgggcatcattgtgcgcaaccgttaatgaaatggttaaatgtgtcttcaacagctagagcgagtttttatatatacaacacgaaagaagacattgatcagttaataaatgccttgaaacaaacgaaggagtttttctcttatgaattttaataatctagatcaattatatagatctgtcattatggatcattataaaaatcctagaaataaaggtgtattagataacgggtctatgacagtagatatgaataacccgacatgcggtgaccgtatacgactaacatttgatatagaagatggcattataaaagatgctaagtttgaaggtgaaggttgttcgatttcaatggcaagtgcatcgatgatgacacaagctgttaaaggtcattcacttggagaagcaatgcaaatgagccaagaatttacgaaaatgatgcttggtgaagactatgtgattacagaagaaatgggagatattgaagcattgcaaggtgtatctcaattcccagctcgtattaaatgtgccacattagcttggaaagcattggaaaaaggtactgttgctaaagaaggtaaagcagaaggtacgactgaagaagaatagaatgctgttaatcatagatgattttgatattagacatataaaagtataaaaatttttataagatgtcatgtcattgttataatatggtttacatcatgaattaaaaacttacgcacgccgttgtaaatatatttttaaggagtgattgaaatggctaaaaaagcacctgatgttggggattataaatatggattccacgacgatgatgtgtccattttcagatcagaacgtggtttaactgagaatatcgttagagaaatttctaacatgaaaaatgagccggaatggatgttagatttccgtcttaaatcattaaaattgttttataaaatgccaatgcctcaatggggtggcgacttatcagaattgaatttcgatgacattacttactatgtaaagccttcagaacaagctgaacgttcatgggatgaagtgccagaagaaattaaaagaactttcgataaattaggaattcctgaagctgaacaaaaatatttagctggcgtttctgctcaatatgaatctgaagttgtttaccataatatggaaaaagaacttgaagaaaaaggtattatctttaaagatacagatagtgctttacaagaaaatgaagaattattcaaaaaatactttgcttctgtagtacctgcagcagataacaaatttgcggcgttaaactcagcagtatggtcaggtggttcgttcatttatgtacctaaaaatatcaaactagatacgccactacaagcttatttccgtattaactctgagaacatgggtcaatttgaacgtacattaatcattgctgatgaaggtgcttctgtacattacgtagaaggttgtactgcaccagtttatacaactagttctttacactctgctgttgtggaaatcattgtgcataaagatgcgcacgttcgttatactacgattcaaaactgggcgaacaatgtatacaacttagttacgaaacgtacttttgtttatgaaaacggaaatatggaatgggtagatggtaacttaggttctaagttaacgatgaaatatccaaactgtgttcttttaggtgaaggtgcaaaaggtagtacattatctattgcatttgctggtaaaggacaagttcaagatgccggtgctaaaatgattcataaagcgccaaatacatcttcaacgattgtttctaaatctatttctaaaaatggtggtaaagttatttatcgtggtattgtacattttggacgtaaagcaaaaggcgctcgttcaaatattgagtgtgatacattaatcttagataacgaatcaacatcagatacaattccatataacgaagtattcaacgatcaaatatcattagaacatgaagcgaaggtttcaaaagtttctgaagaacaattattctatctaatgagtcgtggtatttctgaagaagaagcaacagaaatgattgttatgggattcatcgaaccattcacaaaagaacttccaatggaatacgcggtcgaaatgaaccgtttaatcaagttcgaaatggaaggtagtattggatagctttaaactacgttgttaagctattcttaactgtcgaaaacggttattgataccattttgatactgaatataacaaaaagccacattactgtggcttttttgttttataactaaatcggattgatagataagctttgtacttatttatatcagtccgattttttgattggtgtaaaaaataatcattggtggaggataaagcgacaacacaaatacaacatgattgtggcattagagtgctggtctttattaaattaattgaaaactacaccaaatattttttaaagatgattcgataatagttcgattaagtttcaatgtataagtaagttaaaataagaaaactattaataatattaagttcactacagatgttgctaatggaccgtaagttttaaagccatctttacttttataaccaacaatcgcatctaaaaattgaactaaaatcattgcaatggatatagttatcaaaaatatagcactatgaatgactaaagaaaaaatagctaataaaaataaaggtaagcttcgactaagtgcataatatgcatttatattatggctagatgcacatgcttgaattgaataacctaaacttacactggcactaatgattgtaaatattgctaaaacaaaatacatgttaatccttctttctatatttgaatataaacaagtacttgtctaaagatatttaaaagataattagaataaatttatgagaaacttgttgctaaaattataacggtttcaaattattataactatgtcataaactgaatttgttgaaatttttcattatgtaaatttattcgtaacaatcaggtcgaactatagcatcattttactaatgaatgcattaaagtaactatgattaaaaatgcatattaattatcattattaagtctattatatataatgaattttaactggtttattaaacgagaacgtcgggaattaagtaactacaataaaaataagatatgacaataaggagactacacgcgtgatcattgccataattatattgatatttatttcgtttttcttttcaggaagcgagacggcattaacggctgccaataaaacaaaatttaaaactgaagctgacaaaggtgataaaaaagcaaaaggcattgtaaagttgcttgaaaaaccaagtgagtttattacaacgattctaattgggaataatgtcgcgaatattttattaccaacactagttacaattatggctttacgttgggggattagcgttggtattgcatcagctgtgttaacagttgttatcattttgatttccgaagtgattcccaagtctgtcgctgcaacatttccagataaaataacaaggcttgtatatccaattattaatatttgtgtaattgtgttccgtcctatcacattacttttaaataagttgacggacagtattaatcgaagtttatctaagggacaacctcaagaacatcaattttcaaaagaagaatttaaaacaatgttagcaattgctggacatgaaggcgctttaaatgaaattgagacgagtaggttggaaggtgtcattaattttgaaaatttaaaagtaaaagatgttgatacaacacctagaattaatgtgacggcatttgcttcaaatgcgacatacgaagaagtttatgaaacggttatgaataagccatacactagatatccagtgtacgagggagatattgataacattattggggtgtttcattctaaatatttgttggcttggagtaataaaaaagaagatcaaattacaaactattcagctaagccattatttgtgaatgaacacaataaagctgaatgggtattacgtaagatgactatttctagaaaacatttagcaattgtgttggacgaatttggtggtactgaagcgatagtgtcacatgaagacttaattgaagaattattaggtatggaaattgaagatgagatggataaaaaggaaaaagaaaaactttctcaacagcaaattcaatttcaacaacggaaaaatcgcaacgtatctatataaggagcgaacagctatgtggaataagaatcgacttactcaaatgttaagtattgaatatccaattatacaagcaggtatggcaggaagtacgacaccgaaattagttgcatcagtaagtaacagtggtggattaggcacaataggcgcaggttactttaatacgcagcaattagaagacgaaatagattatgtacgccaattaacgtcaaattcttttggtgtaaatgtctttgtaccaagtcaacaatcatttaccagtagtcaaattgaaaatatgaatgcatggttaaaaccttatcgacgtgcattacatttagaagagccggttgtaaaaattaccgaagaacaacaatttaagtgtcatattgatacgataattaaaaagcaagtgcctgtatgttgttttacttttggaattccaaatgaatctattataaaaagattgaaagaagcaaacattaagcttataggtacagcaacgagtgttgatgaagctattgcgaatgaaaaagcgggtatagatgctatcgttgctcaaggtagtgaagcaggtggacatcgtggttcatttttaaaacctaaaaatcaattacctatggttggaacaatatctttagtgccacaaattgtagatgtcgtttcaattccggtcattgccgctggtggaattatggacggtagaggagttttggcaagtattgtcttaggtgcagaaggggtacaaatgggcaccgcatttttaacatcacaagatagtaatgcatcagaactactgcgagacgcaattataaatagtaaagaaacagatactgtcgttacaaaagcgtttagtggaaagcttgcacgcggtatcaacaataggtttatcgaagaaatgtcccaatacgaaggcgacatcccagattatccaatacaaaatgagctaacaagtagcataagaaaagccgcagcaaacatcggcgacaaagagttaacacatatgtggagtggacaaagcccgcgactagcaacaacgcatcccgccaacaccatcatgtccaatataatcaatcaaattaatcaaatcatgcaatataaataatcgaccgcaatccacaaaagcacaagcacccccaaactttattttagcgcttgtcatttcgtggattgcgtttctattttaccaatctaattaaacgaaattatcgagctaaagttcgctaaaatgattatgattaaacgaaaacatcaagctaaagttcgctgaaatgattatagtcaaacgaaaacatcaagctaaagttcactgaaatgattatagtcaaacgaaaacatcaaactaaagttcactgaaatgattataataaaagttatatggtatgatgacattggtgatatatatgataaacatcggattaacaggttggggtgatcactattcattatatgaagatttagaacgccaaaccgataaacttaaaacatatgctggacattttccggttgtcgaattagatgcgacatactatgcgatacaaccggaaagaaatatattgaaatggataaaagaaacgcctgatacatttgaatttgtggtcaaaattcatcaagcactcacattgcatgcagactacaaatcatttgcagatacaaggcaagaactatttgatcaatttaagaatatgttagagcccttacatacacagaaaaggttagcaatggtattggttcaatttccgccatggtttgactgcaatgcacaaaatatcaaatatattttgtatgtaagacagcaattacaagcatttccaatgtgtgtagaatttaggcatcaatcatggtttagtgatgcatttaaagaacaaacattggcatttttaacagaacatcaaatcattcatgcagtagttgatgaaccacaagtgaaagatggcagtgtacctttagtcaatcgaatcacaaatgaaattgcgtttgtacgttatcatggacgtaatcattacggttggactaagaaagatatgtcagatcaagaatggcgagatgtacgctatttatatgattataatgagcaagaattgatagacttggcacaaaaggcacaaatattagcacaaaaagctaagaaagtttacgtcatatttaacaataattctggtggtcatgcagctaataatgccaaaacatatcagcgattattgaatatagaatatgaagggttagcaccacaacaattaaaattattttaagaggcgacgactatgttattaacaattacattattagttctaatcggtggtttgtcagcaatcatcggatcaatcgtaggcattggaggcggtattattatcgttccaacaatggtttacctcggtgttgaacatggattactacataatattacaacacaagtagcgatagggacgtcttcagtcattctaattgtgactggactttcttcatcgcttggatatctaaaaacaaaacaagttgatattaaaaatggttccatctttttatttggactattaccaggttcattgcttgggtccttcattagtagatatttaacatttgagtcatttaatttatattttggtatctttttaattttcgtagccattttattaatgataagaaataagattaaaccgtttaaaatatttgataaaccaaaatatgaaaaaacttatgtagacgctaaaggtaaaacatatcattatagtgtgccgcctttattcgcttttgttactacatttttaattggtattttgacaggtttatttggtattggaggtggcgcactaatgacgccactaatgcttattgtatttagatttccacctcatgtagctgttggaacaagtatgatgatgattttcttttcaagtgtcatgagttctatagggcatattgctcaagggcacgtagcatggggttatgcaatcattttaattatttctagttattttggtgcgaaaatcggtgtcaaagtgaatcagtcaattaagtcagatacggtagtaacattattgagaacagtaatgttgttaatgggtatatatttaattattcgtgcgttgatttaatacaacttaaaaaggaggacgtcaatttgaggcttacaatttatcatactaacgatattcatagtcatttacatgaatacgaacgcattaaagtatatatggcagaacaacggccacgacttaatcatccttctttatatgttgatctaggtgatcatgtagatttatccgcacctataactgaagcaactttaggtaaaaagaatgtggcattactaaatgaagcaaaatgtgatgttgcaaccatcggtaataatgaagggatgaccatttcacatgaagctttaaatcacctttacgacgaagcaaaatttatagtgacatgtagcaatgttatagatgaatcaggtcatttaccaaataatatcgtttcttcttatattaaggatatagacggtgtgaaaatactattcgttgcagcgacagcaccttttaccccattttatcgtgcactagattggattgttaccgatccacttgattctataaaagaagaaattgaacttcaacgaggtaaatttgatgtattaatcgtgctaagtcattgtggcattttcttcgatgaaacattatgccaagaattgcctgaaattgatgtcatttttggtagtcatacgcatcattattttgaacatggtgaaattaataatggtgtactgatggcggcagctggaaagtatggtaattatcttggagaggttaatttaacttttgaggcacataaagtagtacataaaactgcaaagattattcctttagaaacattacctgaagttaaaacttcatttgaagaagaaggaaaaacgctaatgtctaatccggtaattcaacatccagtagtgcttaagcgtagtatgaaccacataactgaagctgcatacttattagctcaaagtgtttgtgagtatacacatgcacaatgtgccatcatcaatgctggcttactcgttaaagatattgtaaaagatgaagtgacagaatatgacattcatcaaatgttaccgcatccgattaatatggtaagggttagactttctggtgtgaaattaaaagagattatagctaaaagtaataagcaagaatatatgtatgaacatgcacaaggtttgggtttcagagggaatatatttggaggatatattctttataatttagggtacattcattctacagggcgttactatctgaatggagaagaaatcgaagacgacaaagaatatgtactaggtacgatagatatgtatacgttcggtcgttatttcccaacattgaaagaattaccaaaagagtatttaatgccagagtttttaagagatatatttaaagaaaaattattggaatattaaaaagtaagattattggattttcatttgtcatgaatttcgatataatgtttaaagatacacttaacaggagggtatgtgttgttatggcgacaaaaaacgaggaaatattacgtaaaccggattggttgaaaataaaattaaataccaacgaaaactatacaggacttaagaagatgatgagggaaaaaaatcttaatactgtatgtgaagaagctaaatgtcctaatatacatgaatgttggggtgcacgtcgtacagcgacatttatgattttaggtgccgtatgtacaagagcttgtcgtttttgtgcggttaagacaggtttacctaatgaacttgatttaaatgagcctgaacgtgtagctgaatcagttgaattaatgaacttgaaacacgttgttatcactgctgttgcgcgtgatgatttaagagatgctggttcaaatgtttatgctgagacagtacgtaaagttagagaaagaaatccatttacaacgattgaaattttaccatcagatatgggcggggactatgatgcgttagaaacattaatggcttcaagacctgacattttaaaccataatattgaaactgttcgtcgattaacaccgagagttcgtgcgcgtgcgacatacgacagaacattagagtttttacgtcgttcaaaagaattacaaccggatatcccaactaaatcaagtattatggttggattaggtgaaactatagaagaaatttatgaaacgatggatgatttacgtgcgaatgatgtagatattttaacgattggtcaatatttacaaccttcacgtaaacatttaaaggttcaaaaatattacacgcctttagagtttggtaaattaagaaaagtggcaatggataaagggtttaaacattgccaagctggacctttagtacgtagttcttatcatgcggatgagcaagtaaatgaagctgctaaagaaaagcaacgccaaggtgaggcacagttaaatagttaatatttaaccattaataaggcataaaggcttagtttgtacaaaacgaacgtgtcatagaagtaatcattatttttatgaaacactaaaagtataaactgagcctttcattgtcatagataggtgaagaatttgataaaagtagatcaacattactttgaattaatagaaaattatcgcgaatgttttaatgaagaacaatttattgctaggtattcagatattttagataaatatgattacattgttggtgactatggttacgatcaattacgattaaaaggtttttacaaagattctaataaaaaagcagagatgagtaaacgtttttcaaatattcaagattacatatttgaatattgtaactttggttgtccttactttgtattaagacatttgtctaaacaagaggttaaaaagttaatcgaagaagttcatccgtctgatgtgatagatgacgacaataaacttcaagatgtgaagattaagccaaccattcaagatactgaacattaataaaacccttagctagattgaaaatgggaatcatgcaattcaagcatggacctgtaatctagttaggggtttttatctttaatgaatgacttcatttaaatactcagtaatttcatcgccttcttcagcatttacacctaaaatatgagcgatatagccttcttcttttaaatcatcagtaccgataataccgaatttatttgtttgcatattaagtacgagtgtcttaccataatgtctatttgtatggactaacattaaatcatatcgaccatgctcgccaacaaaaccaacaaactgaacttgactctcttcgttgtcatcatataaatacatatcaatcattttgtagcgactccttttaaaagtagtaaagttagtataacgacaaatgaagtatactgcaaaattatgataatatataagcgagaggtgacaaggaatgtattttgtagacaaagataaactaactcagaaattagcctatttacaagcattaactgatgattattatgagagtaagcacaatcattatgcatttgaacgtattgctcaaatgttgatagaatcatcggtagatatagggaatatgattatcgatgcatttattttaagggatcctggtaattataaagatgtgattgatatattagaactagaaaatgttattactaaagaaacacagcaggcgattaataaaactgtcgatattcgtaaacaatttacatatgattacacagtcttagatattaaggttatcatgccaatgtttgatgacgcattaccttattacaaacaatttattacagaagtaacgacatttttacatcaagaaaatgtaccagtaacagcttttggtaaaggagaaaatcaataatgaaacagtataaagcgtatttaatcgatttagatggcacaatgtatatgggaacagatgagattgatggagcaaaacaattcatcgattatttaaatgtaaaaggcattcctcatttatacgtaactaataattcaacgaaaacacctgagcaagtaactgaaaaattacgtgaaatgcacattgatgctaaaccagaagaggttgtaacgtcagcgttagccactgctgattatatttcagaacaatcaccaggagcatcagtatatatgttaggtgggagcggtttaaatactgcgttaaccgaagcgggacttgtcattaaaaatgacgagcatgttgattatgtagttattggacttgacgaacaagttacatatgaaaagcttgcgattgcaacgttaggtgtaagaaatggagcaacatttatttctacaaatccagatgtgtcaattccaaaagaacgaggatttttaccagggaatggtgctattacaagtgttgtaagtgtatcgacaggcgtatcgccacaatttattggtaaaccagaaccgatcattatggttaaagcattagaaattttaggattagataaatccgaagttgctatggtaggcgatttgtacgataccgatattatgtctggtattaacgtaggtatggatacgattcatgtacaaacaggtgtatctacgttagaagatgtgcaaaataaaaatgtgccaccaacgtattcttttaaagatttaaatgaagcaatagctgaattagaaaaatagatatagtcattttataaagtaggtgaattgatttggtaaaaatagttgtttcgaggaaaattccggataaattttatcaacaattaagtaaacttggtgacgttattatgtggcaaaaatcattagtgcctatgcctaaagatcaatttgtgacagcacttcgtgacgcagatgcttgttttatcacattaagtgaacagatcgatgcagaaattttagcacaatcaccaaatttaaaagtaattgcgaatatggctgtagggtatgacaacatcgatgttgaaagtgcaacagcgaacaacgtggttgttacgaatacaccaaatgtacttactgaaacaactgcagaattaggatttacattaatgcttgctacagcacgccgtattgtagaagctgaaaaatatgtagaagcagatgcatggcaaagctggggtccttatttattatcaggtaaagatgtcttcaattcaactattggaatatatggtatgggagatattggtaaagcttttgcaagaaggttgcaagggtttaatactaaaattctttatcataatcgatcaagacataatgatgcagaggcggactttaatgcaacatatgtttcttttgaaacgttgttagcagaaagtgattttatcatctgtacagcgccacttacaaaagaaacacatcataaatttaatgctgaagtatttgaacaaatgaaaaatgatgcaattttcattaatatcggtagagggcaaattgtagatgaaacagcattaatcgatgcactagacaataaagaaattttagcatgtggtttagatgtattagcaaatgaaccaattgatcatacacatccattaatgggacgtgataatgttctgattacaccacacattggtagcgcatcagtaacaacacgggacaatatgattcaattatgtattaataatatagaagcggttatgacaaatcaggtaccacatactccagtaaattgaaaataagtatggttttttaatcattggtaaaacaagcaaagcaattgtaaaattggttatgtttgacttgcgaatgtatatatttgcgctgatgataattccataacattataaactcgtcatattaatgtgatgagtttatttgattttgacgtatataacaaaattgttatatagactgtaattgtttattgtttaaataacctttaaaatgaatgatgttctcaacaaagtgtatcatttaaaataattgagtgatgacaaccaattactatgttgaatctataaaattaaaattgaatttcattatgaatatcgatataatgaattgtaaaaaacaaattttaaaacgtattttatattgaacggtctttataaagacgtttttactaagaactttaagaggtgcaatatgaaatctaaaagtaaacagccacctaataaatatgttgaagcattcaaaccatatttattaacactattgtatttggcaatatttattactttatatttaatttatggcagtggcgacacacacaataacttcatttataatgagttctaatgagggagacttaatatgacagatattattaacaagctgcaagcgtttgcggatgcaaatccacaaagcattgctgttagacacacaactgatgaattaacttatcaacagttaatggatgagtctagtaaattagcacatcgattacaaggtagtaagaaaccgatgattttattcggtcacatgtcaccatatatgattgttgggatgattggtgccattaaagcaggatgtggatatgtacctgtagacacttcaattcctgaagaccgtattaaaatgattattaacaaggttcagccagagtttgtatttaatacgactgatgaatcatttgaaagtttagcaggcgaagtatttacaatagaagatattaaaacatctcaagacccagtaatttttgatagtcagattaaagataacgacacagtatacacaatctttacatctggttctactggggaacctaaaggtgttcaaattgaatatgcaagtttagttcaatttactgagtggatgttagaacttaataaatcaggaaatgaacaacaatggcttaaccaagcaccattttcatttgatttatctgtaatggctatttatccatgtttagcatcaggcggtacattaaatcttgtagataaaaacatgattaataaacctaaattattaaatgaaatgctaacagcaacaccgattaacatttgggtatcaacaccatcatttatggaaatgtgtttattattaccaacgcttaatgaagaacagtatggtagtcttaacgaattcttcttctgtggtgaaattctacctcacagagcagcaaaagcgttagtaagccgtttcccaaatgcgacgatttacaacacatatggtccaactgaagctacggtagcagttacaagtattcaaattacacaagaaatattagatcaatatccgacattacctgttggtgttgaaagaccaggcgcaagattatctactacagatgaaggtgaacttgttatcgaaggtcaaagtgtaagtttaggatacttaaaaaatgaccaaaaaacagctgaagtatttaatttcgatgacggtattcgtacttatcacactggtgataaagcgaagtttgaaaatggtcaatggttcattcaaggtcgtattgatttccaaatcaaattgaatggctacagaatggaattagaagaaattgaaacacaattacgccagtctgagttcgtaaaagaagcgattgttgtacctgtatataaaaatgataaagttattcatttaattggtgcaattgtgccaacgactgaagttacggacaatgcagaaatgactaaaaatattaaaaatgacttgaaatcacgcttaccagagtatatgattcctagaaagtttgaatggatggaacaattgccattgacttcaaatggtaaaattgacagaaagaaaattgcagaggtaattaacggatgattccatatggtgattttacattcttcttaattgctttaattgcattattaccagtcattatacttggatttttaggtaagcgaagttacatttataatggcgtagttacagcatttatgattgtgttaatcttttcttctgataaacataatctgtttgaccaaaagtatttaagtgttcaattaattagttttattatttacgtcgtatggcaagttttattgataatgttttattatcattcaaaaccaaaaaataattcattttcaaaatttgtaactgtaatggttttatcaatattgccattagcacttgtgaaagtgttacaaagtacatggttaggtggacatcagattcacttccatgaaagtaaattaattgagtttgttggtttcttaggaatttcttatgttacattcaaaagtgtgcagttaattatggaaattcgtgatggttctatcaaagaaattaaagtatggaaattaattcaatttatttcattcttcccaacgatttcatctggaccaatcgatcgttacaaacgtttcgttaaagacgataaaaaagtaccaacaggcaatgaataccgtgaattagtattaaaagcaattcacatgattatgcttggtttcttgtataaatatattgttgcttactttattaacacatatgcaatcatgccgttacaattagacttacatggctttgtcaatttgtggttatatatgtacgcatacagcttatatttattctttgactttgcaggttatagtttatttgcgatagcatttagttatttattcggtattaaaacaccaccaaacttcgataaacctttcaaagcgaaaaatattaaagatttctggaatagatggcatatgacattatcattctggttcagagattgtatttacatgagatctttattctacatgtctcgtaaaaaattattgaagagtcaatttgcaatgtctaacgtggcattcttaatcaacttcttcataatgggaatttggcatggtatcgaagtgtattacattgtttatggtttataccatgcagcattgtttataggttatggctattatgaacgttggcgcaagaaacatccgccacgttggcaaaatggtttcacaacagcacttagcattgtgattacattccactttgtaacatttggctttttaatcttctcaggtaaacttatataataaaggagaatttaattatggaatttagagaacaagtattaaatttattagcagaagtagcagaaaatgatattgtaaaagaaaatccagacgtagaaatttttgaagaaggtattattgattctttccaaacagttggattattattagagattcaaaataaacttgatatcgaagtatctattatggactttgatagagatgagtgggcaacaccaaataaaatagttgaagcattagaagagttacgatgaaattaaaaccttttttacccattttaattagtggagcggtattcattgtctttctattattaccagcacgttggtttacaggcttagtaactgaaaagactgtagaagataatagaacttcattgacagatcaagtactaaaaggcacactcattcaagataagttatacgaatcaaacaagtattatcctatatacggctctagtgaattaggtaaagatgacccatttaatcctgcaattgcattaaataagcataacgccaacaaaaaagcattcttattaggtgctggtggctctacagacttaattaacgcggttgaacttgcatcacagtatgataaattaaaaggtaagaaattaacatttattatttcaccacaatggtttacaaaccatggtttaacgaatcaaaactttgatgctcgtatgtctcaaactcaaattaatcaaatgttccagcagaaaaacatgtctactgaattaaaacgtcgttatgcacagcgtttattacagtttccacatgtacacaataaagaatacttgaaatcttatgctaaaaaccctaaagaaactaaagatagttatatttctggttttaaagagaatcaattgattaaaatagaagcgattaaatcattgtttgcaatggataaatctccattagaacatgttaaacctgctacaaaaccagacgcttcttgggatgagatgaaacaaaaagcagttgaaattggtaaagctgatactacatcgaataaatttggtattagagatcaatactggaaattaattcaagaaagtaagcgtaaagttagacgtgactatgaattcaatgttaattctccagaattccaagatttagaattacttgtaaaaacaatgcgtgctgctggtgcagatgttcaatatgtaagtattccatcaaacggtgtatggtatgaccacattggcatcgacaaagaacgtcgtcaagcagtgtataaaaaaatccattctactgttgtagataatggtggtaaaatttacgatatgactgataaagattatgaaaaatatgttatcagtgatgccgtacacatcggttggaaaggttgggtttatatggatgagcaaattgcgaaacatatgaaaggtgaaccacaacctgaagtagataaacctaaaaattaaaatacaaatagcacataactcaacgattttgattgagggtatgtgctatttttatattttaaatttcatagaatagaatagtaatatgcgcttggatatgtggctataataaaataattaatcagataaatagtataaaataactttcccatcagtccaatttgacagcgaaaaaagacaggtaataactgattataaataattcagtattcctgtctttgttgttattcataatatgttctgttaacttaatatctttatattagaatacttgttctacttctattacaccaggcacttcttcgtgtaatgcacgctcaataccagctttaagagtgattgtagaacttgggcatgtaccacatgcaccatgtaattgtaatttaacaataccgtcttccacgtcaatcaatgagcagtcgccaccatcacgtaataaaaatgggcgaagacgttcaataacttctgctacttgatcaaacatcgttgtatcttcagtaggcatcaggcaagtctcctttcgagagatgaatttgataatctttattagtatattataatagatagtgtaacaaaaatctatcaaaccaatgggggataaatatatggagcacgtgagtgtggtagtatatggggcagatgttatatgtgcaagttgcgttaatgcgccaacatcgaaagatatttatgactggctacagccactattaaaaagaaaatacccaaatatatcatttaaatatacgtatatagatattacaaaagataatgacaacttaacagatcatgatttacaatttattgaaagaatagaacaagatgaactattttatccattaattacaatgaacgatgaatatgtagcagatggttatatacaaacaaagcaaatcactcgatttatagaccaaaagcttgtgaatgaataatatacacataataaaaagcaatgtcagtaatagtgtgaactgacattgctttttaatttttaaccattatgatatttatataaccaaagtacgccggattttaaaatagaagcgagtcgtcctgttacagtgcgatccatgatatatgcaaaaccttgtttatctcctaatgacccaacgataccttgtacctttagttccggcattttgtcaggtaatggttcatttagccattgctttttaagcacatcggcaatttgatcaccttgaacttcggctaactgagcacttggcgcatgtggtaaatcagcacaatcaccaactacatagacgttacgatatgttggtacttgatgatactggttaactatcacgcgtccattactatttatatcaatcggcaagttacgaacaacttcaacaggttgaattcctgctgtccatacaactaaatcaatatctttaggttcatcacagttatatattttaccaggttcaactttattaatatttgaatttggaacaacggtaacattatttttggcgaaccatttcgcaacatacttacttaatttttcaggaaaatttcttaaaattcgcggcccacggtcataaagatatatttccaagtctgatctactttctcttaattcgctggcaagttctatgccacttaatccagcaccaacgataccaactttagcaccttctggtagttcactaatactatggaaagtatcccgagcctttgagagtgtttgaatactatgtgtatattcttcggctcctggaacgttatgatatttatcttcacatcctaaaccaatgattagctcatcataatcaattttagaattaccgactgagacaatttgagcatctaaatctatgtcgttaatttcaccataaaccgtattcacttgtggatgattagggaatttcatgcgaacatctttatctgatttcgtgcccgcagctaaagcataaaattctggtttcaatccatgaaatggcatacgatcaactaatgtgactgtataatcttgtggtaaagatgtagttaaaatgcgtgacatgatacgcatattaccatatccgccgcctaacaaaactaagtttttcataatgaagtaccccttttatatgttaatatttactttaattttgaaaagatcaaagtgcatagatatatttgttaatgaacagttataaaatgcaagtgtctttgattcatcaataacccctaaaaaagtaaatatgtatttatatgcttattatatatttttttgaaaatgactacaaataaatatttgtaccaactaaggcactattgcataactgggataagaaacatcagttgttgctaattgagcacatcatgttaaaataccagttttaaaatgctataatattgtaacaaatgaaataagaaggtgaagtatgaatccgatcgtagaattttgtctctctaacatggcaaaaggtggagattatgtttttaatcaactggaaaatgacccagatgtcgatgtgttagagtatggttgcctgacacattgtggtatatgttcagccgggttgtatgctttagtaaatggtgatattgttgaaggtgattcgccggaagaattattacaaaatatatatgcacatataaaagaaacttggattttttaaggaggagttatcatgccaacagttatattaacagaagcagctgcctacgaagtaaaagatatgcttaaagcaaatgaaatgccagatggctatttaaaaattaaagtgaatggtggcgggtgcactggtttaacatacggtatgggtgcagaagaagcgcctggtgaaaatgatgaagtcttagaatactttggattaaaagttttagtggacaaaaaagatgcacccgtattaaatggtacgactattgattttaagcaatcattaatgggtggcggtttccaaatcgacaatcctaatgcaattgcatcatgtggctgtggtagttcatttagaactgcaaaagttgcaggtaatcctgaaaactgctaataaaataactttttaatgattaacccaatttttgggatacaaattgatatcaattacgattagggacatatttgattatgtcctatttttgcgtaaagatattttgttttattaaaaagcttattaaaaattaagaatctgactattaatagtattttaaatgattgtgatagcggatacatttttaatcgaaatcaggctacgaaaaaattaattaattttttcacaatctgactgaatcttgcttgaaaatataacataaaagctatagaattagtattggattaaaaatgtcttttttgtgaacatcacaggtttttacataatttaaaagacttaaataacaaaatgatgataaactagtatacattgtggtaaaagtaggaatgaccagttgttactagtaattatcagcatttggttaaaaaaatatgaaagcttaggtgaaattaaatggctcaagatcgtaaaaaagtacttgtacttggtgctggttatgcaggtttacaaactgtaactaaattgcaaaaagcgatatcaacagaagaagcagaaattacgcttattaataaaaatgaatatcactatgaagcgacatggttacatgaagcatcagcaggtacactaaactatgaagatgtattatatcctgtggaaagtgtcttgaagaaagacaaagtgaactttgttcaagcagaagtaacaaaaattgaccgtgatgctaaaaaggtagaaacaaatcaaggtatttatgactttgatattttagtagtagcattaggtttcgttagtgaaacattcggcatcgaaggtatgaaagatcatgctttccaaattgaaaatgttatcacagcacgtgaattatcacgtcatatcgaagacaaatttgctaactatgcagcatcaaaagaaaaagatgataacgatttatctatcttagttggtggtgctggattcactggtgttgaattcttaggtgaattaacagacagaattcctgaattatgtagcaaatatggtgtggatcaaaataaagttaaaatcacttgtgttgaagcagcacctaaaatgttaccaatgttctcagaagaattagttaaccacgcagttagctacttagaagaccgcggtgttgaatttaaaattgctacaccaatcgttgcttgtaacgaaaaaggttttgtagttgaagtagacggtgaaaaacaacaattaaatgcaggtacttcagtatgggcagctggtgtacgtggtagtaaattaatggaagaatcatttgaaggcgttaaacgtggacgtatcgttacaaagcaagatttaacaatcaatggttacgacaacatttttgttattggtgattgttcagcgtttatcccagctggagaagaacgtccattaccaactacagcacaaattgcaatgcaacaaggtgaaagtgttgctaaaaacattaaacgcatcttaaacggtgaatcaactgaagaattcgaatacgttgatcgtggaactgtttgttctttaggttcacatgacggtgtaggtatggtatttggtaaacctatcgctggtaaaaaagcagcattcatgaaaaaagtgattgatacacgtgcggtattcaaaatcggtggtatcggtttagcattcaaaaaaggtaaattctaggctttagattaagatacagctaaacgcataaaattaaattattcatttataaagtccttcagtgtcactgaagggctttattgttgtacaatttgaagtgagtaacatatcaaatctaaggaggtacattatgaattttaaattaaataacacattaagcaacgaaataaatacgttgattattggtataccagaacatttaaatcagttagaacgcattagttttaatcatatcgatattacagaatcacttgaaagactaaaacatcaacatattattggtagtaaagttgggaagatttatacaactgcatttgatgtacaagatcaaacatatcgtttaattacagttggtttaggaaacttaaaaacacgtagttatcaagatatgttgaaaatatggggacatcttttccaatacataaagtcagaacacattgaagatacgtatttacttatggattcatttatttcaaaatatgatcagttatcagatgtattaatggcatgcggtattcaaagtgagcgtgcaacatatgaattcgatcattataaatcaagtaagaaggcaccgtttaagacgaatttaaaccttattagtgaatcattaattgaattagatttcattcatgagggtatcagtattggcctatccattaatttggcaagagactttagtaatatgccaccgaatgtattaacaccacaaacatttgcagaagatattgttaatcattttaaaaatacaaaggtcaaagtagaggttaaagattatgacactatagtttctgaaggatttggacttttacaagcggtaggtaaaggtagtaagcataaaccgagattagtaaccatcacatataatggcaaagacaaagatgaagcaccaattgccttagttggtaaaggtataacgtatgattctggtggttatagtattaaaacgaagaatggcatggctacaatgaagtttgacatgtgtggcgctgcgaatgtcgttggtatcattgaagcggctagtcgtttacaactgcctgtaaatattgtcggagtgcttgcttgtgctgaaaatatgataaatgaagcgtcaatgaagcctgacgatgtatttacagcattgagtggtgaaactgtagaagtaatgaatacagacgctgaaggtagattagtccttgcagatgctgtgtattatgcaaatcaatatcagcctagtgtgattatggactttgctacattaacgggtgcagcaattgttgcactaggcgacgataaagctgctgcatttgaatcgaatagtaaagtgatattaaaagacatattacaaataagttccaaagtcgatgaaatggtatttgaattaccgattactgcaaccgaacgtgcaagtattaaacacagtgatatcgctgatttagttaaccatacgaatggacaaggtaaagcgctatttgcggcaagttttgtaacacattttagtggtcaaacaccccacattcatttcgatattgcaggtccagcaacgactaataaagcttcatataatggtccaaaagggccaacaggatttatgattccgacgatagtacaatggttaaaacaacaataatttaattaattgcctgatacaacttgtgtcttgttttacatttctaatttaactcttgaaagtataaaggatcgcattgtatcaggcatttttattgttgtaagaaaatataaatcgcatatccttgtgagcataaatcaacttgactagcattgcaaaaacttaatgtaatcatatgttcattcagtcaacgactactaatataacattatagaacttaggattttgattggtgttccaggcttgtaaaattgtttaatttaatgaaagcgaaaattattttaagaaagacaattaactaaaaaataaagattattggtatagtttgctattgacaggtgttaaagctactgatactatgtagtctataaacgctttagttcgatagagtggtaaaggatggttgtcatatgataaatgcagtagtaatagcagtaatattaatgattgtgctatgtttatgtcgattaaacgtagttataagcttatttatcagtgcgctagttggtggcttaatttcaggcatgagcattgaaaaagttataaatgtatttgggaaaaatatagtcgatggtgctgaggtagcattaagctatgccttattaggtggatttgcagcattaatttcatacagtggtatcacagactatttagtaggaaaaattataaatgcaattcacgctgaaaatagtcgatggtcaagagttaaagtaaaagtgacaataatcattgcattattagctatgagtatcatgagtcaaaacttaattcctgtacatattgcattcattccaattgtcatcccaccattattaagtctgtttaatgacttaaaaatagatagacgtttaatcggtttgattatcggttttggtttatgtttcccgtatgtgttattaccatatggattcggtcaaattttccagcaaattattcaaagtggctttgcaaaggcgaatcacccaattgagtttaatatgatttggaaagcaatgcttattccttcaatggggtatattgttggcttacttatcggtttatatgtatatcgtaaaccacgtgaatatgaaacacgtaaaatttcagatagtgacaatgttacagagttaaaaccatatatcttaatagtaacaattgtagcaatactagctacatttttagtacaaacgtttacagattcaatgatttttggtgccctggcaggggtactcgtattctttatttcacgtgcatataattggtatgaattagatgctaagtttgttgaaggtattaaaattatggcttatattggtgtagttattttaacagcaaatggatttgctggtgtaatgaatgctactggtgatatagatgaattagttaaaactttaacaagtattactggtgataataaattatttagcattatcatgatgtatgtgataggtttaattgtcactttaggtataggatcatcatttgcaacaattcctattatcgcatcattattcattccatttggagcgtcaattggactaaatacaatggcattaatcgcattgattggaacagcgagtgcattaggtgactcaggttcacctgcaagtgattcaacattaggacctactgcgggattaaatgttgatggccaacatgatcatatacgcgatacatgtgtaccaaacttcttgttttataatattcctttaatgattttcggtactattgctgctatggtactataagcataaagaggtgaaaatatgactcatttattagagacatttgagatgtcaatagatcaccaggaagatggtttagttgttatttctatgcctgttactgataaagtaaaacaaccatttggatatttacatggtggtgcttcgattgctttaggtgaaacagcatgttcattaggatctgctaatttaattgatacaaccaaatttattccattaggtttagagatgaatgccaatcatattcattctgctaaagatggtcgtgttactgcgacagctgaaattattcatcaaggtaagtcgacacatgtatgggatataaaaattaagaatgacaaagaacaattaattacagttatgcgtggtacagttgctattaaacctttaaaataaaagaactgctagctgaaaagttatgagatattcataactacggctagcagtttttttatgcgctatattgttgtagttttagaaatgcttgttcaatgcgttcggcagctttacggccacccataacatttctaccaaatggtcctaattctaagtctgcaaagcatcctgcgacaaatagatttggtatccattctaatttttcggaaataacagggtaattacattcgttaataggtgcatcataattttgtattaattgcttaataagtggttgtgacataaaatcttgttcaaaaccagttgcaaccataatctgttgatatggaacagaatcattttcagtgttaattaaaccatcactaatttgagtgataggtgttttatgcacatttatacgaccatttttaatatgttttttaaggcgtaagtacagttcgtgaggcattgatcctttatgacgttcacgttgtacaatggcatttctttcaggcatgcttttagtacttaaaaatgaagacatatttttcggacctaaccaaccaggatcagcatcaaagtcatgtatttcaatatccttatttagccataaatgaatttttttatcgtcatcatgatttaacaatttaagtgcaagatgtgcagcagtaatgccactaccaacgatatgatcggtcttatcatatactacttgatcatgttctttctcgaagatatgttttacattctgtttgtcttttaaaatgtcaggcataaacggaatatttgtactgcctattgcaataacgacgcaatctgtagtgataatttgtccatcttctaacttgatatgccatttgtcttcttgtttatctaaagtttgaactaaaccttgaaccaagcaatcctctaattgatattgtttagaagcatgtgcaatatgatccataaacattgtcaattcaggtcgttgataaggaccataaaaagcatttgtatattggtgctgtttagcgaattgttttagatggaacggttgtggatgtacgtgatgtacaatcggtgatcttaaataaggcatttctattcgatttgtatatgagttaaacctttgacaaaaagtttcgtgtgggtcaatgattgttaatcggtctgttgttaatccgcttgataatagtttttgtgcgattgcagttccctgtatgccaccgccgataattgtccaatgcataataaaacctctctctttttaaagcgtaatcgttacgatttataattattattatcataatacataacgacatgaaaggcaattaaattaaagagatatacgtagatagggcgaagctgtagtcaaagaagtatgtactaaactaaattcattgaaaaaggggtaacaatgtcaaaagaaaacagcagtaaaatcattcctaatttggaatcatcttactgctgtttgttgttgatttatattcatgactttgttatataatctacaattttgtgtcttttaagtcttctgaaatttcatcgactttagtctttttagtataaggcgttttaatattatatgctgctttcataatcatatgacttgaaagaggacctgtaattaatacaaagataatcgcaacgattaattgcatatttacaaaaccttgagtagcaataaaatataaaaatgtaccaaatagtaatgacattgcacctaatgttgatgcttttccggcagcatgtgcacgtgaatatacatcttcaagtctcaataatcctatagctgctagggcgctaattaaagcaccgatgataacaaagataagtgcaagactaatcagtatgattttgatcatgttcaatcaccttacctttgtccataaatttagagaatactgcagtacctaaaaaggctaatataccaatcatcataataacgacaatcatgtatttaatatttaataagatactgaataatgctataactgccattaattgaagaccaatcgcatctaatgcgacaacacgatcggcaagtgatgggcctagcacaacgcgaatgagcatagctaacatagaaatgacaactatgattaatgcaataacgataataacattatgattcattatatttcgcccacctctcttacaattttctctaatgatgttttaatactttccacttcttgctctttagttgaaaaatctatggcatgaatataaatttttgtacgatcatcacttacaccaagcactacagtaccaggtgttaatgtaattaaattagacaacaagacaatttgccaatctttttttaaatctgtgtgataaacaaagaatcctggttcatttttaatcgaaggtttgataataatttttagaacatcaaaattagctttaatcagttcgattaagaaaataataactaatttaataatacgatatagcgtgatgacataaaatctacctggtaacactctgtgtaagaggtaaacaagaactaggccaaagatgaaacctaacacaaagttatttgttgtgtaactatttgtcacaaacaaccaaaacactgcgataataaagtttaatactaattgtacagccatgttatttacctcctaatacagctttaacgtaggttgatggattgtagaatgtttctgcaccagcttttaccattggatataagtaatctgctgacaatccatataaaacagttatcacaactgcaacgattgcaatcgtagttaaatatttgacgtcgactttgttattaagatcatatccttttggttgaccgaaaaagccttgtaggaatatgcgaatgacagaatataatacgactaaacttgataataagacgatgacaccacttaaataaaatcctctttcaaatgttgattggacaatgaaaaattttccataaaagccactgagtgggggaatgccagctaaacttaatgctgcgataaagaatgaccaaccaagtacgggatatcgtttaattaagccaccaaattgtcttaaatcagcagtgcctgtaattttaatcataattccaataagcaagaataatgcaagttttactaacatgtcgtgcaatgtatagtaaatagcaccaatcatacctgactctgtcatcattgcaacgccgactaagatcacacctacagcaatcatgacattgtataggatgatttttttaatgttggcatatgcaacagcaccgacacaaccaaagatgatcgttaatagtgctaagaataaaatgacataatgtgaaaagcttacattatcactaaagaataggctcaatgttctagcgattgcataaacaccaacttttgttaacaaagcgccaaagaatgcaatgattggaattggtggtgcatagtatgcactaggtaaccaaacaaacattgggaatacgccagcttttgtagcaaaaacaaagataaatagtatgaaaacgatattgactaagccactgtcatgcgctgaaaggttagctaatttattgcttatatctgctagattcaatgttcctactactgaatataaaatcgctacacccattacgaagaaggacgacgatacaacgttaacaagaacatattttattgtttcttgtaattgaatttttgtagaacctataactaataagaaatatgatgacattagaaatacttcgaaaaatacgaataggttgaaaatgtcaccagttgtaaaggcaccaatgatacctattaacataaatagtactgaaaaataataataatatctttcacgttcaataccaattgtttggtatgaatataaaatcacaatagctgtaattataatactagtaataattagtagggcactgaatatgtctaatacaaagacaatactatatggtgctttccatgaacctagctctacacgtattggtccatgttttacaacatttgctaaattgataattgccgcgaccaaggttaataatgtaccgcctagtgcgacataacgctttataatagggcgctttccaataaagacaagtaatatggctgtaattactggaatgacgagcgttaacacaagcatattactttcaatcatcttctggaactcctttcatactctcaacgttatctgtgcctaattctttatatgttctaaatgctaatactaagaaaaaggctgttgtcgcaaaggcgataacgattgctgttaaaataagtgcttgcgggataggatcaacatagctttttacgttcgcttcataaattggaacagtaccatgtttaagtccacccatagttattaaaaataaatttgctgcatgtgttagtagtgtagttcccataacaattcgtatcagacttttagacaaaacgagatagacactaattgctgtgagaataccactaacaaaaatcataataatttccactattcgttctctccaatcgaaataataattgtcatgacagtaccaactactgcacataaaacaccgaaatcaaagaatactgctgttgtcatatgaacaggttctaatataaataacggtatatcaaatgtgacatgcgtaaagaaatttttacctaaaaaccaacttgcgataggcgtcgcaatacaaaaaactaatccaatacctatcaagattttaaaatctaatgggaaaattttacgcattgtttctatatcaaatgcaatcgtaatgataacaagtgaacttgcgaataataatccgccgacgaaaccgccaccaggtgtataatgtcctgctaagaaaagtgaaaaaccaaagaccattaccatgaaaaagataataactgcagcaaattgcaaaattagatcattttgttgtctattcatgatttttcacctcgttaccttgcgtttgacgctttttacgtaatttaatcattgtatatacagctaatcctgcgataccaaggacagatgactcgaataaagtatccataccacggaaatcaacaagtataacgtttaccatgtttttaccgtgagctaaatcataaacgtgctcttgataaaacttagatatcgattcaaaatgtctatttccgtatgcaattaaaccgataataatgacggacaaaccaacaccaccagcaattaaagcattagtaagctggaatgagcgcttttcattataacgatttaaatttggtaagtggtagaagcataataagaacaatgctgttgaaatagattcaacgacaaactgtgtcaatgctaagtcgggtgctttaaagaatataaacaatacagacacagcatatccaactgcacttaacataatgatgctaaataatcttgatttagcgaaaagaattaaaaaggcagcacttaataataaaattacgatacaaacttcgaaaattctaatcggactaacgtctttaaaattaatgttgaaaggtactgagaatacagtgacaaatgttaataaaattaatgcaccaaaaatgataactaaattattacgtgaataatcggtaacatagctattcgtcatcttttcagagtagtttggaataacatttgcacttctgttgtaccaataattgaatgttagtttatcaggttgtcgttgcaacaatttcacccaataactaaatgtcacaattagtaagatacctaaaatataaatcactaatgttgataaaaaggcaggcgttaatccatggaacatatggaattcaacatcatcaatgactgtatgattaatcgaagatgtagctggttcaataatcgaattagttaaaatgccagggaataaaccaaatacaattactaatgtagctaaaatagctggtgataaaagcattaatattgatacttcgtgtgcttttttaggtaattgttcaggtttatattgtccgaaaaatatatgcattataaatttaattgaatatacaaatgtgaagacactgcccactataccaatgattgggaataggtagcctaatatatcaacactgaataaatttgcttggcttgctgtaaatgttgtttctaaaaatgattcttttgataagaaaccattgaacggtggtacaccagccatacttaatgctgtaataacagtgattgtaaatgagataggcataattgttagtaagccacctaatttcttaacatcacgtgtaccagtagaatgatccactgcacctgtaatcataaatagggcacctttaaatgttgcatggttgattaaatggaatattgcagccgtaaatgcagcagcatatattttgctatcatcgccttgatagtgataactaatggcaccgattccaagcatcgccataatcatacctaattgggatactgttgaaaatgccagtatacctttcaagtcttgttgttttgttgcgtttagcgaagcccagaataacgtaattaaaccaacgagtgtgacagtccatatccaaccttgcgatgctgcgaagattggtgtcattcgagcgattaaatataaacctgctttaaccattgttgctgaatgaagataagcactgactggtgtaggtgcttccattgcatctggtagccaaatataaaatggaaactgagcagattttgtaaaagcaccaatcatgattaaaatcatcgcaaaaatgaagaatgggctattttgaatttcagaagcatgttgaatcatgtactgaatgctaaatgattgcgttggtaaagcgagtaagatgataccacctaataatgataaaccaccaaatactgtgattatgagcgatttttgagcaccatatatagatgcttgtcgttcgcgccagaatgaaataagtaaaaaactagaaaatgacgttagctcccagaataaatatagaataataacattatctgaaagtacgacacctaacattgcacccataaatagtaataaataacaataaaaattccctagttgttctgacttacttaagtagccgattgaatataatactactaaactgccgattcctgaaataagcaaactaaagagtaaacctaagccatcaagatataaatcaaagttcataccaaaatgaggcatccaatttaaggttttcattacagtattacctgacatcgtcgttttaattaatgtaagcatataaataaatatgacgatagggacaggtaatacgaaccatcctaaatgtatacgtttaaaaaatctatacaggataggaataatgagtgcgaatattaacggtaatatcaccgcaatatgtaacaaactcactatgttgtcctcctttaaaaaatatttatgttattcattatacatgaatgatatagttctgaaaaacgtacacactccttgttgtgctttattttcagaagtatttaaataagaagaaacacgtcattttttatttaaaattttctttgtattgaagtgaataatcttcttttaagcgtgctaaactagctaaagacatttcagcatgttttgtttgctgagctttaagtttagtttctaaatctgtaattgcttgttgaagtgaatcttcatagcgcaatacatcaacattgaagtcgcgtaattgtgaacgtttcgtatagcgtttttcaaaatgacttaatgctttgcgttcatggaaaaatacaccttcagtttcagtagggttatgtaaatcaccttgtttcgggtgtttgataacttgttcaactttaactagtacatcgtctccattttcttcaacaatcgtgacaccatagctacctgttttgtgtgaaaatcgatataacttcatgctattttcctcccttaaaagtatgttaatatatatgtatcataacatgaatggagaatataaatggctaactatccacagttaaacaaagaagtacaacaaggtgaaattaaagtggttatgcacacaaataaaggtgacatgacattcaaattatttccaaatattgcaccaaaaacagttgaaaattttgtgacacatgcaaaaaatggttattataatggaataacattccaccgtgtcattaatgacttcatgattcaaggtggcgatccaacagctactggtatgggtggcgaaagtatttatggcggtgcttttgaagatgaattttcattaaatgcatttaacttatatggcgcattatcaatggctaactcaggacctaatacaaatggttcacaatttttcattgttcaaatgaaagaagtacctcaaaatatgttaagtcaacttgcagatggtggttggccacaaccaatcgttgatgcatatggcgagaagggtggtacaccatggttagatcaaaaacatacagtattcggtcaaatcattgatggtgaaactacattagaagatattgcaaatacaaaagtgggaccacaagataaaccacttcatgatgttgtaattgaatctattgatgttgaagaataatatctaaacataattaactaccaacattttaaactcggataaagctaatttatgaatggattagtgtatattccaacgaaaacaaataaactaatatgatgagcaatctcaatatatttatcaagaaagcacagtttttaaatagatgtgtattctaaagataatagttgaggttgctttttatgtttttacagagaattgctattcaaatagttaataaattgaaaacaaagtagctggatatcatattgatttagatatgaatttgttgctgattttatttgtaaatcccagtttgtagtattcttattcatttataaaataatattcgtatgatttgatgttttaattagtccaccatttcgatttgtgctatgataatagtgttaagtaaacgaaataaggggttattaagttgaataactacaaaattggccaacatatcaaggtgcgtgtaactggtattcaaccatacggtgcgtttgttgagacccctaatcatactgaaggactgattcatatatcagaaattatggatgactacgttcataatttgaagaaatttctatcagaaggccaaattgttaaagctaaaattttgtctatagatgatgaaggaaagcttaatctatcattaaaggataatgattacttcaaaaattatgagcgtaagaaggaaaaacaatcagtattagatgaaatcagagaaacagaaaaatatgggtttcaaacacttaaagaacgcttaccaatctggataaaacagtcaaagcgagcaattcgaaacgactaaaggaacagataaatcgtaccgaaaatcatacaaagggtctgaaatgaaagtttcttagactataaaagagattagtatctattaaattttattagatactaatctctttttgtctacgataacctaataagattgattctatttacacatacaaatggtttaaggtgacatatccattatctttgttagatagagtcgtttatttgcaataatgtatgtggttttgttttttaatttattttagaaatgagaactacaacttaaagcattaaacgaaatgtaactatataaacagataattggagaatgaaaaaattacatgttatagtcaactcaataattttaaggaggaattaagtaatgaaaagtaaatacgaaccattgtttgataaagtagaattaccaaatggagtagagttgagaaatcgatttgtgttagcccctttaacacatatttcttcaaatgatgatggtactatttcagatatagaacttccttatattgaaaagcgttcacaagatgttggtattacaattaatgctgcgagtaatgtgagtgatgtcggaaaagcatttccaggacagccatcaatcgcgcatgacagtgatattgaaggactaaaacgattagctacagcaatgaagaaaaacggtgccaaagcactcgtacaaatacatcatggcggtgcacaagcattgcctgaattaacacctgatggagacgtcgtagcaccaagtccaatttctttaaaaagtttcggtcagaaacaagagcatagtgcaagagaaatgacggctcaagaaattgaacaagcgataaaagattttggagaggcaacgcgacgtgcaattgaagcagggtttgatggtgttgaaatacatggcgcgaatcattacttaattcatcaatttgtatcaccatactataatagaagaaatgatgtatgggcaaatcaatataaattcccgatcgctgtgattgaagaagtgcttaaagcgaaagaaatgtatggtaataaagactttatagttggatacagattatctccagaggaagcggagtctccaggaatcacaatggaaattacagaggaactcgttaataaaattagccatatgccaatcgactatattcatgtttcaatgatggatacgcatgcaacgactcgtgaaggtaaatacgctggacaagaaagactgcctttaattcacaaatggataaatggtcgtatgccacttatcggtattggttcaattttcacagctgacgaagctttagatgcagttgaaaatgttggtgttgacttagtagccattggtagagagctactactggattatcaatttgttgaaaaaattaaagatggacgggaagatgaaattattaattactttgatccagagagagaagataatcatcacttaactcctaatttatggcatcaatttaatgaagggttctatccattaccacgtaaagataaataagtgtttaactgttaccactaatgatattgtgtatgcaatttgttagtggttttcaatatttataaataaaaatattcttagtaaaatatacttttgattaagtgtaaaattatcaattcttttgcttgtaatcatttaagtaattatgtcattataaatgtaagggttttcaaaatagacaaatttaatgaaacttagtgattatttcatcttttttggtggaaaagtatctgctttgaaaactaatgtaattatttggataatgtttcatgtataatagttataaatgatgaaaaggggagatatgatgactaaatctgaaaaaattattgagttaacaaatcattacggagcacataattatttaccattgccaattgtcatttcagaagctgaaggggtatgggttaaagatcctgaaggcaataaatatatggatatgttatctgcatattccgctgttaaccaaggtcatagacatccgaaaattattcaagcattaaaagatcaagctgataaagtgactctagtttcacgtgcttttcatagtgataacttaggagaatggtacgaaaaaatttgtaaactggcaggtaaagataaagctttaccaatgaatacaggtgctgaagcagtagaaacagctttgaaagcagcacgacgctgggcatacgatgttaaaggaattgagccaaataaagcagaaatcattgcatttaatggtaacttccatggtcgaacaatggcgccagtttcattatcatcagaagcagaataccaacgtggttatggtccgttattagatggatttagaaaagttgattttggagatgtagatgcattgaaagctgcaattaatgaaaatactgcagcagttttagtagaaccaattcaaggtgaagcgggtataaatataccaccagaaggatatttgaaagcaattagagaattatgtgatgaacataatgtcttatttattgctgacgaaatccaagcaggattaggtcgttcgggtaaattatttgctacggattgggataatgtaaaacctgatgtctatattttaggtaaagcactaggtggtggtgtcttcccaatttctgttgtattagcagataaagaagtattagatgtctttacacctggctcacatggttcaacatttggtggtaatccacttgcttgtgctgcatcaattgctgcattagatgttatcgttgatgaggatttaccagggcgctctttagaattaggagattattttaaagaacaattaaagcaaattgatcatccatcaattaaagaagtccgtggacgtggtttgtttataggtgtggaacttaatgaaagtgctagaccatattgtgaagctttgaaagaagaaggcttattatgtaaagaaacgcatgatactgtcattcgttttgcaccaccattaattattactaaagaagaattggaccttgcacttgaaaaaataagacatgtatttcaataatgtcaaaaagttgtaacaatcagtttgtaagggctttaaaaaggaatacgttatgttacaatatgtttgaaagcgaaatcattaggtaaagaagaggcgaaaaggatcatgactgagaacaataatttagtaacttctactcaaggaattattaaagaagcattgcataaattgggatttgacgaaggaatgtacgatttaattaaagaacctttaagaatgttacaagtgcgtatccctgtacgaatggatgatggcactgttaaaacattcacaggttaccgtgcgcaacataatgatgctgttggaccaacaaaagggggcgtgcgtttccacccagatgttgatgaagaagaagtaaaagcattatcaatgtggatgactttgaaatgtggcattgttaacttaccatacggtggtggtaagggtggtatcgtttgtgatccacgtcaaatgagcattcatgaagttgaacgtttatcacgcggatatgtaagagcaatttcacaattcgtaggtccgaacaaagatattccagcaccagatgtatttacaaactcacaaattatggcttggatgatggatgaatatagtgcattagataaatttaattcaccaggtttcatcacaggtaaaccaattgtattgggtggttctcatggacgcgacagatcaactgcactaggtgtagttattgcaattgaacaagctgcaaaacgtcgtaatatgcaaattgaaggtgccaaggttgttattcaaggtttcggtaatgccggaagtttcttagctaaattcttatatgatttaggtgcaaaaattgtaggtatctctgatgcttatggtgcattacacgatccaaatggcttagatatagattatttattagaccgtcgtgatagttttggtacggtaacaaatttatttgaagaaacaatctcaaataaagaattgtttgaattagattgtgacattttagtaccagcggctatttcaaaccaaattacagaagacaatgcacatgatattaaagctagcatcgttgttgaagctgctaatggacctacaacaccagaagcaacacgtattttaactgaacgtggtatattattagttccagacgtattagcaagtgctggtggtgtaacggtttcttatttcgaatgggtacaaaataatcaaggttattattggtctgaagaagaagttaatgaaaagctacgtgaaaaattagaagcggcatttgatacgatttacgaattgtctcaaaatcgaaaaatagatatgagacttgcagcatatatcataggtattaaacgtacagcagaagcagctagatatcgtggttgggcataattaattatcatatgtgatttaacgagcttgggacagaaaacaaagccctaagctcgttaattttattttagcagtagttgactgaataaaaatacacttgtaacaagcttatttcaaaaatagccggggccccaacacagagaaatttaggagccaatttctacagacaatacaagttggcggggccccaacacagaagctggcgaaaagtcagcttacaataatgtgcaagttggcggggccccaacacagaagctggtggaaagccagcttacaataatgtgcaagttggcggggccccaacacagaagctggtggaaagccagcttacaataatgtgcaagttggggtgggccccgaacactgagaatttctaattaaacggtcaactatatatttgatcaaaaagacagcagtaggatattttctattcggaaatatcttactgctgttttttatagtaatagctatatttttgtatttatgttttatagttgaacaatactacttaatgacttctttatatttatcagcaaaatttgtaaagacaccatcaacgccgtatttatttaatcgtaacatatcagctttttcattcactgtataaggatgtactataaatcctaagtcttttaaatgatgggtattttgttcagttaaatctgtataatcaggacctaatccaatcgcataagagcgtatctcttttaagcgttggtcgttaaattgttgtagttcacctttatcaactaattttactaatggcacatgcttattttgacgatgaattttctttaaactttcgtcagaaaatgattgaatcattacatgtccattttttaatttattgttatttaaaaggtgatgccttttcaatgaagctaataattgttcttccattcctgggtatacatcaggtgactttgtttcaatataatagtttgcattcggaccataacgttctaaaatttcatctaaagtgggtactttagcatttttataacttgctctcgcgtattttggatattttttattaaaccaacttcctgcatctaattgttttaattcatcaagggtataatcctcaactttaccgtgtccatttgttgtacggttaacagtttcatcatgcatagcaactaaatggccatctttggtacgttgtaaatcaatttcgatataagatgctttcaactcattatgactcttatcgtatgcttgaaacgtatgctcgggtgcatagccacttgcgccacgatgtgcgatagtcgtgaatcgctcatttgttaaatttgtatgccattgaatcgcctgaggtttatttgcaatttgatttgtttgttcagcgccagcagtaggtactgataaaaatcccatagtaaaaacagcagaagcagccataaatttagtgaagcttttcgaagagttagtcatagtctttatcctttcatctctttatttgtagtctaacaattttaaaatactataaaatgatgtttgtgaaaacgctttacacatttcttttacaatttataacatttctgtaatataaatttaaaagaattatcaaacattttaggaatcttaaaaatgtgatgttcaataagacaattagagcattaaaatacccacaatgtaattttcatagacattgtgggtaggtagattaacgtatttattgtgatagtaattgtttagcaacatcaagttgttgtttgaccgatgattgacccgttgaaccgtaactttgacgtcgttttaagcaattttcaggctgcaaataatcataaatatcggaatcaatactagaatgatgttgttgatatgttgctaaaggaacatctaataaataatgaccttgttgtatacattctaagacgatttttcctacaatttcatgtgcagttctaaatggaatatttttagttactaaataatctgccagttccgttgcatttgaaaaatcttctttaacagtttgattgagtcgttctttattaattgtcatcgtttgaatcataccttcgaaaatacgtaaagaacctttaattgtatggacagcatcgaataaaccttctttatcttcctgcatatctttgttatatgctagaggtaatccttttaaagtcataagcatactcattaaatgaccagtcgttcggccaactttacctctaattaattctgccatatcaggatttttcttttgtggcataatagatgagccagttgaaaatgcatctgataatgtaatgaatttagcttcgtctgtggaccagaaaataatttcctctgcaaagcgtgataagtgaaccatcgttaaagaaatattatgcaatgtttcaataatatagtctctgtcactcacagcatctaggctattctcatagagactgccaaagttcaacaatgctgttgtctcgtgtctatcgatagggtatgtggtaccacttaaggctgctgcacctaaaggattaatatcgattcgttttaaactatcttcaaatcgttgttggtctcgttgtaacatccaaaaataagtcataatatgatgtgcaaatgaaattggctgtgcacgctgtaaatgagtataaccaggcataattgtatcaacattattggaagcgatgtctacaattacactttgtaacgacttaattaatgcgatgatatcttgcacttgtttcttagtgtacaagtgcatgtctgttgcaacttgatcgtttctactgcgtccagtatgcaacttaccaccagcatcaccaatacgtttaattaattcatgttcaatatttaaatgaatatcttctaatgatgcactaaattgaatttgatcttgatgataatcatgttgaatagattttagtccttgtataatttgttcgctgtcttgttgactaataatgccttgattcgcaagcatagttgcatgcgcaatgctgccttcgatatcttgatctatgagcgtttgatcaaaagtaatggatgcgttaaagtcatcaacccactcttcaggttgtacttcaaatctaccgccccaagctttattgctcattgctattgcctccatgtaacatcgcatttacttgagtaggtaaaccatagatatcgataaagccaacagcagcgtcttgattaaatgcatcttcttttgtataagttgctaatttttcatcatataatgtgtaaggtgattttctaccattcacgatggcattacctttgaataatttaattctgacatcaccacttacgtattgctgagtactatcaataaataatttcaagctatcagttaaaggtgagaaccaaagtccattgtatagttgttcagcaaattgcttctcaatgattggtttaaagtgtgcaacatctttcgttaacgtaatcgtttctaatgctttatgcgcttttaaaataacttctgcagcaggtgcttcataaatttctcttgatttgatacctacaagtctattttctacatggtcaattcttccaataccatgcttaccagctaatgcattcaacgttaaaattaaatcgtctaattcatatgttttgccatcaatttgaactgggatacctttaacaaacgttaaaatgatttcatcagcagtatctggtgtttcttctaaagcatttgttagatcgaacgcatcctctggtggcgcagcataaggatcttctaaaataccacattcattcgctctgccccatagattttgatcgatagaataaggtgaatcatggttgattgatacagggatattatgtttaattgcataatcaatttcttcttcacgactccaagcccactcacgtacaggtgcgaatgctttcaatgatgggtttaatgctttaatggcaacttcgaaacgtacttggtcattccctttaccagtacaaccatgtgcaatacctactgaatttgttttctcagcaatctctactaattttttagcgattaatggtcttgataaagcagaaactaatggatatgcattttcatacattaaatttcctttgattgcataacttacatactcatcactaaattcttttgtcgcatcaataatatgacattcaatagctcccatatctaaagctttttgataaacgatgtctaaatctttaccttcaccaacatctaggcaacaagctacaacgtcgtatcctttgtcgataagccattgaacggccacacttgtatctagtcctcctgaatatgctaaaacaattttctctttcataaaattcacctcattgtagttatctgaatatttcgtatgaacacatgatagcaaacttttaatgaaaataaaaccattattttacatatttattcataaaatatgatagaggcagttagagttagaagtataaatgcttatttatcaatgtttaaaagtgttttaaaaaacatgcaaattgtataaaaaatgtttgagtgtttgacgccagtttgaaatgtttgttgaaaaataggtgtgaaacgtcacataaatatcaattttattgattaagtacaaacttgtgaattgaatcgcaaacgtaaacttagtaaaattaagatattaaatgaaacaggaggcttttatagatgactcatattcaattagactttagtaaaacgttagaatttttcggtgaacacgaattaaaacaacaacaagaaattgttaaatcaattcacaaaacaattcatgaaggtactggtgcaggtagtgacttcttaggctgggttgatttaccagttgattacgacaaagaagaattttcaagaattgttgaagcatcaaaacgcattaaagaaaattctgatgttttagtagtcatcggtattggtggttcttacttaggtgcacgtgcagcaatcgaaatgttaacgtcatcatttagaaacagcaatgaataccctgaaattgtatttgttggtaatcacttatcatcaacatacactaaagagttagttgattatttagcagacaaagatttctctgtaaacgttatttctaaatctggtacaactacagaaccagcagttgcatttagattgttcaaacaattagttgaagaaagatacggtaaagaagaagcacaaaaacgtatatttgcaacaacggataaagaaaaaggtgctttaaaacagttggctacaaacgaaggttatgaaacgttcatcgtacctgatgatgtaggtggaagatattctgttttaacagcagtaggattattaccaattgcaacagctggaattaacatcgaagctatgatgattggtgctgcaaaagcacgtgaagaattatcttcagataaattagaagaaaacattgcataccaatatgcgacaattcgaaacattttatatgcaaaaggttatacaacagaaatgttgattaactatgaaccatctatgcaatactttaatgaatggtggaaacaattatttggtgaatcagaaggtaaagacttcaaaggtatctatccttcaagtgccaactacacaactgatttacattctttaggtcaatatgtacaagaaggccgtcgtttcttattcgaaacagttgtaaaagtaaatcatcctaaatatgatattactattgaaaaagatagtgatgatttagacggattaaattatttagctggtaaaacaatcgacgaagttaacacaaaagcattcgaaggtacattattagcgcatactgatggtggtgttcctaacatggtagtgaacattccacaattagatgaagaaactttcggttatgtcgtatacttcttcgaacttgcttgtgcaatgagtggataccaattaggcgtaaatccatttaaccaacctggtgtagaagcatataaacaaaacatgttcgcattattaggtaaacctggttttgaagacttgaaaaaagaattagaagagcgtttataaaatacattacttcaatgattagtgatctataaaatggtataaatatagagctgaatattaagttcattgataaaaatgaaaaggcaatttctatttagagttatttaaatagaagttgtctttttatattattaaaaattttgattggtatagaattaagttacatgtatttattattagttaactatatttataggaggcggttagtatgaatacaagtttgtttttaataattgctgtttttagtgttttgttgacgatgataatttctataaatgaaaagcataaaaaataaacattgtacatcgaagtgtatattaaataaatagtgatgaaagagattaattatattacttgttcgaagtgatagtatgttttgtgatatttaattagcacctataattttcactgtaaaagaaactttaaagagaggtttatgttggaaagtttatatagaaaaatacagatagtattaataatattaacagcagttgtttgttttaatgggttattaaatactaatgtaacgataaaaatgaatataaatatttttgtttttagtggcatattgttattagcttttatttgttgggcttatgttaaacttaacaaatttaagtaatggatggtcaatggattagaaaagcattgagaaattttaaaatataaaatgcaagtagtcaacgtcagtaagtgtctgatatatatatataaaggtcctaggctcgttcctacgtttagacaaatacttaagacgaagaatgttaagagaaaattaaagataaaataatatctgccatacaataatattgttatactactagagactgatttattagcatgattacatgttaatatttctttacttagtaattaactttataatgtaagaataattatcttcagccaaagaaagggattgatgatttgtcgtttcatcaagtagaagaatggtttgagatatttcgacagtttggttatttacctggattcatattgttatatataagagcgattattccagtatttccattagcactctatattttaattaatattcaagcctatggacctattttaggtatattgattagttggcttggattaatttctggaacatttacagtctatttgatctgtaaacgattggtgaacactgagaggatgcagcgaattaaacaacgtactgctgttcaacgcttgattagttttattgatcgccaaggattaatcccattgtttattttactttgttttccttttacgccaaatacattaataaattttgtagcgagtctatctcatattagacctaaatattatttcattgttttggcatcatcaaagttagtttcaacaattattttaggttatttaggaaaggaaattactacaattttaacgcatcctttaagagggatattaatgttagttgtgttgattgtattttggattgttggaaaaaagttagaacagcattttatggggtcgaaaaaggagtgacatcgtgaaaaaagttgtaaaatatttgatttcattgatacttgctattatcattgtactgttcgtacaaacttttgtaatagttggtcatgtcattccgaataatgatatgtcaccaacccttaacaaaggggatcgtgttattgtaaataaaattaaagttacatttaatcaattgaataatggtgatatcattacatataggcgtggtaacgagatatatactagtcgaattattgccaaacctggtcaatcaatggcgtttcgtcagggacaattataccgtgatgaccgaccggttgacgcatcttatgccaagaacagaaaaattaaagattttagtttgcgcaattttaaagaattagatggagatattataccgcctaacaattttgttgtgctaaatgatcatgataacaatcagcatgattctagacaatttggtttaattgataaaaaggatattattggtaatataagtttgagatattatcctttttcaaaatggacgattcagttcaaatcttaaaaagaggtgtcaaaattgaaaaaagaattattggaatggattatttcaattgcagtcgcttttgtcattttatttatagtaggtaaatttattgttacaccatatacaattaaaggtgaatcaatggatccaactttgaaagatggcgagcgagtagctgtaaacattattggatataaaacaggtggtttggaaaaaggtaatgtagttgttttccatgcaaacaaaaatgatgactatgttaaacgtgtcatcggtgttcctggcgataaagtagaatataaaaatgatacattatatgtcaatggcaaaaaacaagatgaaccatatttaaactacaatttaaaacataaacaaggtgattacattactgggactttccaagttaaagatttaccgaatgcgaaccctaaatcaaatgtaattccaaaaggtaaatatttagttcttggggataatcgtgaagtaagtaaagatagccgtgcgtttggcctcattgatgaagaccaaattgttggtaaagtttcatttagattctggccattcagcgaatttaaatataatttcaatcctgaaaatactaaaaattaatatgaatataatacaacatcgtttgtcggttttaatactgataaacgatgttttattttgtcagtaccacaataaaagctaagttcgaaatgaacttataataaatcaatcacaatcactttgtgttaaaatatgtgtcaaaggaagtgagggtttgtcatgacattacatgcttatttaggtagagcgggaacaggtaagtctacgaaaatgttgaccgaaataaaacaaaaaatgaaagcagatccgcttggagatccaatcattttaattgcgccaactcaaagtacatttcaattagaacaagcctttgtcaatgatccggaattaaatggtagtttaagaacagaagtgttgcattttgaacgattaagtcatcgtattttccaagaagttggtagttatagcgaacaaaagttatctaaagctgcaacggaaatgatgatttataacattgttcaagaacaacaaaagtatttaaaactttatcaatcacaagcaaaatattatgggtttagtgaaaaattaacagaacaaattcaagattttaaaaaatatgcagtaacgcctgaacatttagaaagctttattgctgataaaaatatgcaaactcgaactaaaaataagttagaggatattgctttaatataccgagagttcgaacaacgcattcaaaacgagtttattacgggtgaggatgcattacaatattttattgattgtatgccgaaatcagagtggctaaaacgtgctgatatatatattgatggttttcacaacttttcaacgattgagtatttaataatcaaagaattaattaaatatgcgaagagtgtcacaattatattgacgacagatggtaacaacgatcaattcagtttatttagaaaaccatcggaagtgttacaacatattgaagaaatagcaaatgaactcaatatttctattgaacgtcaatatttcaaccaattttatcgctttaataatcaagatttaaagcatcttgaacaggaatttgatgcgtttcaaatcaatcgagtggcatgtcaaggtcatatcaatattttagaatctgcgactatgagagaggaaataaatgaaattgcacgacgtatcatcgttgatattcgtgataagcaattacgatatcaagatattgctattttatatcgtgacgagtcttatgcttatttatttgattccatattaccgctttataatattccttataacattgatacaaagcgttcgatgacacatcatccggtcatggaaatgattcgttcattgattgaagttattcaatctaattggcaagttaatccaatgctacgcttattgaagactgatgtgttaacggcatcatatctaaaaagtgcatacttagttgatttacttgaaaattttgtacttgaacgtggtatatacggtaaacgttggttagatgatgagctatttaatgtcgaacattttagcaaaatggggcgtaaagcgcataaactgaccgaagatgaacgtaacacatttgaacaagtcgttaagttaaagaaagatgtcattgataaaattttatattttgaaaagcaaatgtcacaagccgcaactgtaaaagactttgcaactgctttttatgaaagtatggaatatttcgaactgccaaatcaattgatgactgagcgagatgaacttgatttaaatggtaatcatgaaaaggcggaagaaattgatcaaatatggaatggtttaattcaaatccttgatgacttagttctagtatttggcgatgaaccaatgtcgatggatcgtttcttagaagtatttgatattggtttagaacaattagaatttgttatgattccgcaaacattggaccaagttagtattggtacgatggatttggctaaagtcgacaataagcaacatgtttacttagttggaatgaatgatggtacgatgccacaaccagtaactgcgtcaagcttgattacagatgaagaaaagaaatactttgaacagcaggccaatgtcgagttaagtccaacatcagacattttacagatggatgaagcatttgtttgttatgttgctatgactagagctaagggaaatgttacattttcttatagtttaatgggatcaagtggcgatgataaagagattagtccgtttttaacgcaaattcaagcgttattcaatcgacttgaaattactaacattcctcgttatcacgaagtagcaccgctatcgttaatgcaacatgttaagcaaacgaaaattgcattatttgaggcgttacgatcatggttagatgatgaaattgtcgctgatagttggttagatgcttatcaagtaattagagatagcgatcatttaaatcaaggtttagattatttaatgtcagcattaacgtttgacaatgaaacagtacaattaggtgaaacgttgtctaaagatttatatggtaaggaaatcaatgccagtgtatctcgatttgaaggttatcaacaatgcccatttaaacactatgcctcacatggtctgaaactaaatgagcgaacgaagtatgaacttcaaaactttgatttaggtgatattttccattctgttttaaaatatatatctgaacgtattaatggcgattttaaacaattagacctgaaaaaaataagacaattaacgaatgaagcattggaagaaattttacctaaagttcagtttaatttattaaattcttcagcttactatcgttatttatcaagacgcattggcgctattgtagaaacaacactaagcgcattaaaatatcaaggcacgtattcaaagtttatgccaaaacattttgagacaagttttagaaggaaaccaagaacaaatgacgaattaattgcacaaacattaacgacaactcaaggtattccaattaatattagagggcaaattgaccgtatcgatacgtatacaaagaatgatacaagttttgttaatatcattgactataaatcctctgaaggtagtgcgatacttgatttaacgaaagtatattatggtatgcaaatgcaaatgatgacatacatggatatcgttttacaaaataaacaacgccttggattaacagatattgtgaaaccaggtggtttattatacttccatgtacatgaacctagaattaaatttaaatcttgggcagatattgatgaagataaattagaacaagatttaattaaaaagtttaagctcagtggtttagtgaatgcggaccaagcagttattgatgcgttggacatccgtttagaacctaaatttacttcagatattgtaccagttggtttgaataaagatggctctttgagtaaacgaggcagccaagttgcagatgaggcaacgatttataaattcatccaacataacaaagagaattttatagaaacagcttcaaatattatggatggacatactgaagttgcaccattaaagtacaaacaaaaattgccatgtgctttttgtagttatcaatcggtatgtcatgtagatggtatgattgatagtaagcgatatcgaactgtagatgaaacaataaatccaattgaagcaattcaaaatattaacattaatgatgaatttgggggtgagcaatagatgacaattccagagaaaccacaaggcgtgatttggactgacgcgcaatggcaaagtatttacgcaacaggacaagatgtacttgttgcagccgcggcaggttcaggtaaaacagctgtactagttgagcgtattatccaaaagattttacgtgatggcattgatgtcgatcgacttttagtcgtaacgtttacaaacttaagtgcacgtgaaatgaagcatcgtgtagaccaacgtattcaagaggcatcgattgctgatcctgcaaatgcacacttgaaaaaccaacgcatcaaaattcatcaagcacaaatatctacacttcatagtttttgcttgaaattaattcaacagcattatgatgtattaaatattgacccgaactttagaacaagcagtgaagctgaaaatattttattattagaacaaacgatagatgaagttatagaacaacattacgatatccttgatcctgcttttattgaattaacagagcaattgtcttcagatagaagtgatgatcagtttcgaatgattattaaacaattgtatttctttagcgttgcaaatccagatcctacaaattggttggaccaattggtgacaccatacgaagaagaagcacaacaagcgcaacttattcaactactaacagacttatctaaagtatttatcacagctgcctatgatgctttaaataaggcgtatgatttgtttagtatgatggatggcgtcgacaaacatttagctgttatagaagatgaacgacgtttaatggggcgtgttttagaaggtggctttattgatataccttatttaactggtcacgaatttggcgcgcgtttgcctaatgtaacagcgaaaattaaagaagcaaatgaaatgatggtcgatgcgttagaagatgctaaacttcagtataaaaaatataaatcattaattgataaagtgaagagtgattacttttcaagagaagctgatgatttgaaagctgatatgcaacaattggcgccacgagtaaagtatcttgcgcgtattgtgaaagatgttatgtcagaattcaatcgaaaaaagcgtagcaaaaatattttggatttttctgattatgagcattttgcattacaaattttaactaatgaggatggttcgccttcagaaattgccgaatcataccgtcaacacttccaagaaatattggtcgatgagtatcaagatacgaaccgagttcaagagaaaatattatcttgcatcaaaacgggtgatgaacataatggtaatttatttatggttggagatgttaagcaatccatttataaatttagacaagctgatccaagtttatttattgaaaagtatcaacgctttactatagatggtgatggcactggacgtcgaattgatttgtcgcaaaacttccgttcacgtaaagaagtactggcaacgacaaactatatattcaaacatatgatggatgaacaagtcggtgaagtaaattatgatgaatcagcacaattgtattatggtgcaccatatgatgaatcggaccatccagtaaatttaaaagtgcttgttgaagcggatcaagaacatagtgatttaactggtagtgaacaagaagcacattttatagtagaacaagttaaagatatcttagaacatcaaaaagtttatgatatgaaaacaggaagctatagaagtgcgacatacaaggatatcgttattctagaacgcagctttggacaagctcgcaatttacaacaagcctttaaaaatgaagatattccattccatgttaatagtcgtgaaggatactttgaacaaacagaagtccgtttagtattatcatttttaagagcgatagataatccattacaagatatttatttagttgggttaatgcgctccgttatatatcagttcaaagaagacgaattagctctaattagaatattgagtccaaatgatgactacttctatcaatcgattgtaaattacattaatgacgaagcagcagacgctattttagttgataaattaaaaatgtttttatcagatattcaaagttaccaacaatatagtaaagatcatccggtgtatcagttaattgataaattttataatgatcattatgttattcaatactttagtggacttattggtggacgtggacgacgtgcaaatctttatggtttatttaataaagctatcgagtttgagaattcaagttttagaggtttatatcaatttattcgttttatcgatgaattgattgaaagaggcaaagattttggtgaggaaaatgtagttggtccaaacgataatgtcgttagaatgatgacaattcatagtagtaaaggtctagagtttccatttgtcatttattctggattgtcaaaagattttaataaacgtgatttgaaacaaccagttattttaaatcagcaatttggtctcggaatggattattttgatgtggataaagaaatggcatttccatctttagcttcggttgcatatagagctgttgccgaaaaagaacttgtgtcagaagaaatgcgattagtctatgtagcattaacaagagcgaaagaacaactttatttaattggtagagtgaaaaatgataaatcattactagaactagagcaattgtctatttctggtgagcacattgctgtcaatgaacgattaacttcaccaaatccgttccatcttatttatagtattttatctaaacatcaatctgcgtcaattccagatgatttaaaatttgaaaaagatatagcacaaattgaagatagtagtcgtccgaatgtaaatatttcaattgtgtactttgaagatgtgtctacagaaaccattttagataatgatgaatatcgttcggttaatcaattagaaactatgcaaaatggtaatgaagatgttaaagcacaaattaaacaccaacttgattatcgatatccatatgtaaatgatactaaaaagccctcaaaacaatctgtttctgaattgaaaagacaatatgaaacagaagaaagtggcacaagttacgaacgagtaaggcaatatcgtatcggtttttcaacgtatgaacgacctaaatttctaagtaaacaaggtaaacgaaaagcgaatgaaattggtacgttaatgcatacagtgatgcaacatttaccattcaaaaaagaacgcatatctgaagttgagttacatcagtatatagatggattgatcgataaacatattatcgaagcagatgcgaaaaaagatatccgtatggatgaaattatgacatttatcaatagtgagttatattcgattattgctgaagcagagcaagtttatcgtgaattaccgtttgtagttaaccaagcattagtggaccaattgccacaaggagacgaagacgtctcaattattcaaggtatgattgacttgatctttgttaaagacggtgtgcattattttgtagactataaaaccgatgcatttaatcgtcgccgtgggatgacagatgaagaaattggtacacaattaaaaaataaatataagatacagatgaaatattatcaaaatacgcttcaaacgattcttaataaagaagttaaaggttatttatacttcttcaaatttggtacattgcaactatagtattttgattttcaaaagaataaaaaataatttcgattaagtgcaaagtccttgtagcagaatgaacacaactcattttcaaaattgtcttacttatttatttgttatttgataacgaaaaaagttataatgtgaattaagataaagatgaggagttgagaatgaatgaaattcttatcattcaagtataatgacaaaacttcatatggcgttaaagtaaaacgcgaagatgctgtatgggatttaacacaagtatttgctgactttgcagaaggagatttccatcctaaaacattgttagctggtttacaacaaaatcatactttagattttcaagaacaagtacgtaaagcagttgtagcagcagaagatagcggcaaagctgaagactataaaatttcatttaatgacattgaattcttaccaccagtaacacctccgaataatgtgattgcttttggtagaaattacaaagatcatgcgaacgaattaaatcatgaagtggaaaaattatatgtatttacaaaagcagcgtcatctttaacaggagataatgcaacaattccaaatcataaagatattactgatcaattagattatgaaggtgaattaggtattgttattggtaagtctggtgaaaagattccaaaagcattagctttagattatgtttacggctatacaattattaacgatatcactgatcgcaaagcacaaagtgaacaagatcaagcatttttatcaaaaagtttaactggcggttgcccaatgggtccttatatcgttactaaagacgaactaccattacctgaaaatgtaaatattgttacaaaagttaacaatgaaattagacaagatggtaacactggcgaaatgattcttaaaattgatgaattaatagaagaaatttcaaaatatgttgcactacatccgggagatattattgcaactggtacaccagcaggcgttggtgcaggtatgcaaccacctaaattcttacaaccaggtgatgaagttaaagtgactattgataatattggaacgctgacaacttatatcgctaaataattatcatttaaaaagctaaccagtctttatatagattggttagttttttcttgcttttctaaaaaggtgttaaagattattgtttataatgttaccattttgagacgaaagtgaaatattgatattaagaagtagttgattattttacagcagatgcacaatattctaataagtaataaaatgtcatgttcttcctctcaaatatagaagtgtggtaaaatatatatttgtgtatgaacaaataatgattaaattataagaaagtgggtatttatcccacgaagttttaatttaataactaaaattattaaagtgggggaattaatatgttacatttacatattttaagttgggtattagcaatcattttatttatcgctacatacttaaatatttcaaaaaatcaaggtggtacgccatatttcaaaccattacatatggtactacgattatttatgctgttgacgttaatttcaggattttggatattaattcagtcatttatgaatggcggggcaaatcatatgttgcttacattgaaaatgctgtgtggtgtagcagtagttggattgatggaagtgtcgattgctaaaagaaagagacatgaacaaagtcacacaatgttttggataacaattgcattaattatcatcacaatggtattaggtgtcattctaccgttagggcctttatcaaaattattcggtattggctaattgataagacatatagtatatgacataaggcatggacaattattagtccaataccttatgtctttttttgattctaaaaatgtttaaacaaaaaaatgagcctgagacataaatcaatgttctatgctctacaaagttataatggcagtagttgactgaacgaaaatgcgcttgtaacaagcttttttcaattctagtcaaccttgccggggtgggacgacgaaataaattttacgaaaatatcatttctgtcccactcccaacataatactaacctagagaattaagattagattgaatcgcatgattcatttatttagctttgtaaccaatcatattgattaaatctttaggatggctatatggtggtgcataagccacttcaaactcagttaactcatctacagttagctggttcatcattgccatcgatagtacatcaatacgtttatctgcgccttcttttcctactgcagctgctcttaaaatctgacggtttggagtgtcataatacactcttaagtgtaaaggggaatttcctgggtaataattcgcgtgtgcaccttgagtgacttccaccattttatagtcaaattgctttagttcgtttggtttaacgccgacactcgcaaatgtataatcaaagaacttcacaatattgttgcctaagaagcctttgaattcaatagtgtcatttccagcaatttgttcggcaacaatacttgctgcacggtgagcgccccaagctaaaggaacactagccggtagatcgacatgtcgataatgtgatgttgcaatatcgcctattgcataaatgtttggaacatttgtttcaaatttatcgtttaccggtatgaaaccttttcgatcaagtttgatatttgaactttcgataaattttgaattggggtgagtaccgacaccttcaataatcatatcgtaatgttcaacttttcctgatttaaatgtaatttcatttccattgatagcaacaatttcctcatttaaacggtatggaatctcccgcttatctaattcatcaagtataggttgattcatatcggcatccattaatttatttatcttatcagatcgatgaattaaagtagggtgtaaaccacgttcataaaggttttcaagaacttctagtgaaacataccctgcacctacaaccaatactttatcaacttgatttgctttgatgaattgatcgatagcatcagtgtcttctaaatttctaagtgtaaatgtaatatcactttcaaagccaaggctatttgcacttgcaccagggcttaaaatgagtttatcgtatgattcttcaaattgttcgttggtctttctatttaatacagatacagtttgtctttcatcattgattgcaataacttcatgataagtttttactgtaatttgctttctatcataaaatttttcaggtgtatacgctaaagcatattttctatcttcaacaacttcgccaatgacataaggcaatgcacaattagcaaagctcatatcacgatctttttcaaaaataataatgtcactttctttatctaaacgtcgaatttggctggcacatgtagcaccgccagcgactgctccgactacgactattttgggcatcgtaacttacctcctattgttttaaaatattataaaatgattagttataaattaacagtaatatctaatatttaaattaaagaaatcattcaaatatcgaccaatgccatcttcattattgttgaatgtaatattgttcgctacatctttaagttcttgcaaaccattttccatagcaacaccgtgacgcgcgtactcaatcatttctatatcattatcttcatcaccgaatgcaataatattatttcggtcaatatttaaaaattgtctaacttgttcaatacctctcgctttattaattccaagttttacaatttcaatgacagggaatggtgcgccccagcgtcgatgctcaatatgatcggcataaaaatgagtaagcatatttttgatttcaggtattttactttcttcggcttcaattaaaattgaggtaggggattctttcaagtggacaagtaaattaccagtttgaattcttggattacccattgaaaaaccttcaaataatcttggatcatgattgttaatgaaaacataatcttttacttctgcaataatattcgatacttgatattgttgtaatccttgaataatattttgtgcgatgcctaaatctaaaatttcatggcaagttttgaagtttttatctttagggtgatgtacgtaagcgccattaaaattaacaattggtgtcgttaaatttaattcatgataatacatttgacttgcacgataaggtctgccagtcgcaatcataatttggtgtccacgttgttgtaattcatttaatacttgtttagtatatgatgaaatttctttgttatcgtttaataatgttccgtctaagtctagacatattaaatgtggttgcatatctctctcctcataagttgcttagttcatatagatacatcatagcattttattggcgttttgtcggatatttgatatattatgaataatatgacattaaagaggtgatatggatggaagaggcattgaaagatagtatcttaggtgcattagaaatggtaattgaccctgaattaggaattgatatcgttaatttaggtttagtatacaaagtgaatgttgatgatgaaggcgtatgtacagttgatatgactttaacatcaatgggatgtccaatgggacctcaaattattgatcaagttaaaacagtattagcagagattcctgaaattcaggatactgaagtgaatatcgtatggagtccaccttggacaaaagatatgatgtcacgttacgctaagattgcacttggtgtgagctaacataaacgtgcattgcctgtagaaaatggaaacccaattggggctccgcgtccaacttgcattgcttgtagaatttcttttcgaaattctctgtgttggggtcccgcagtcaatataacattgtagagtataattcattgtgaataagctcccttcaaagtagacattgaagggagccttatttacgttctaggttctgattttattttgaaaatttatatctaacttgtttcaaaaatatgaactaagacagtgacttgcacttctaagagtgcacaattcatttcctagttgaatattttcttgaaaatttctataataaattgaatttatattaaagttatattacaatacataatacttcatagtttttaagttgccgagttgcattacaaattggatttcgaaataagaatcatcattggtaatttttttaatttaacagtattttagtcaatatgattttgatgatgtcgtaattcaataatatacatatgcatttcaatattcttttaaacagcataactaaatttaattaagcatctaagaagaacagttttaaaagggaagaatgcaaaaatgaacaaaacaaagggttttacaaaatataagaaaatgagatatatgccagggctcgatggtttgagggcaatcgctgttctaggaattattatttaccacttaaataagcaatggttgacaggtggctttttaggtgtggatacattttttgtgatctctggttatttaattacaagcttattactcaaagagtatgatgacacaggtatcattaaattgaaaagcttttggatacgtcgtttaaaacgtttattaccagcagtcatagttttattaatggttgtagggacagcaaccttattattaaaatcagataatatcattagggttaaacatgatattattgctgcgatattttatgtatcaaactggtggtatatagcaaaagatgttaattattttgagcaattttcatttatgccattaaagcatttatggtctttagcaattgaagaacagttttacatatttttcccagttattttggttacattattgttaacaattaaaaagcgatacaaaataggatttattttttggggagtatctataatttctttagggttaatgatgtttatctacagtattaatggggatcattcacgagtgtattttggaacagatacaagattacagacattgttactgggtgttattttagcttttttatggccaccgtttaaattgaaaaatgatccacctaaagttgtaaaatatgttattgatagcataggtagtttatcatttatagtacttatattattatttttcattattaatgatgagacgaattggatatatgatggtggtttctatttaatatccatattaacgttatttattattgccagtgtcgttcatccatctacatggatagcgaaaatattttcaaatccagtgttagtatttatcgggaaaaggtcttacagtctatatttatggcattttgcagtaattagtctcgtacatagttactatgtagacggacagatacctgtatatgtgtactttatagatataagtttaacaattatatttgcagagctatcatatcgctttatagaaactccatttagaaaagaaggtattaaagctttaaattggcgaccttcttatataccacaatttataagaatggcaattgtagtaaccttgttaattccatttatgttgattttagtaggtgcattcaataaatatggtaaagacattataggagaaaaagcgaatagctttgataccactattgaagataattatttaatgcggatagcaccaattgataacattcacattgatggcttagtaagtgagaagaaaaaggaatcttccgacgtatataataatattaaacctcttttaatcggtgattcagtaatggttgatatcggtgagtcatttaagtcatcagttcctaagtctagaattgatggaaaagtagggcgtcaattgtatcaaaccttacctttagttaaagcgaattattcacaatataaaaattcatctgatcaagtcgtattagaattaggtacaaatggcgactttactgtcaaacagctcgacgatttacttaatcaatttggaaaagccaagatttatttagttaatacacgtgttccaagaatttatgaggcaaatgtaaatcgattattagctgacgcggcgaaacgaaagtccaatgtcacattaattgattggtataagcgatcacaaggacatagtgaatattttgcaccagacggtgtacatttagagtacaaaggagttctagctttaaaagatgaaatattaaaagcacttaaaaagaaataacatatgtttaataagtctagttaatgtgtaacgtaacattagctagatttttttaattcaaaaaattatttacaaatattaggaaatttaagtgtaaaagagttgataaatgattatattgggactataatataattaaggtcaaagaaagtcaaagtcaaaagtgcaacttgaccaactctacaaattagaggtgaaattaatggatataaataaaatgacatatgctgttcaaagtgctttacaacaagcagttgaactgagtcagcaacataaattacaaaatatagaaattgaggcaattttaagcgctgccttaaatgaaagtgaaagcttatataaaagtattttagaacgagcaaatattgaggtagatcaattaaacaaagcttatgtagacaaactaaacacgtatgcatctgtagaaggtgacaatatacaatatggtcaatatattagccaacaagcaaaccaattgataactaaggctgaatcatacatgaaagaatatgaagatgaatatatttcaatggagcatattttacgttcggcaatggacattgatcaaacaacaaaacattatataaataataaagtagaagttatcaaagaaattattaaaaaagtaagagggggaaatcacgtgacatcacaaaatccagaagttaattacgaagcattagctaaatatggccgcgacttagtagaagaagttagacaaggtaaaatggatcctgttataggaagagatgaagaaattcgaaatacgattcgtattttaagtcgtaaaactaaaaacaaccctgtgctcattggtgaaccaggtgttggtaaaactgcaattgttgaaggattagcgcaacgtatagttaagaaagatgtgccagaatcattattagataaaactgtttttgagttagatttaagcgcattagtagcgggcgctaaatatcgtggtgaatttgaagagagattaaaagcagtcctaaaagaagttaaagagtctgatggtagaattatattatttattgatgaaatccatatgcttgtaggtgctggtaaaacagatggtgccatggatgcaggcaacatgctaaaaccaatgttagcacgaggagagttacattgtattggtgcaacaactttaaatgaatatcgagaatatattgaaaaagattcggcattagagcgtcgtttccaaaaagtagcagttagtgagcctgatgttgaagatacaatttcaattttacgtggtttaaaagaacgatatgaagtgtatcatggtgtgcgtattcaagatagagccttagttgctgccgctgaattgtctgatcgttacatcactgatcgttttttaccagataaagcgattgatttagttgaccaagcatgtgcaacaattcgtacggaaatgggatcaaatccaactgaattggatcaagttaatagacgtgtcatgcaattagaaattgaagaaagcgcacttaaaaatgaatctgacaatgcgagcaaacagagattacaagaactacaagaagagcttgccaatgaaaaagagaaacaagcagcacttcaatctcgtgtagaatcagaaaaagaaaaaatagcaaatttacaagaaaaacgtgcgcaactagatgaaagtagacaagcgttggaagatgcacaaacaaataacaatttagaaaaagctgctgaactacaatatggaacaattcctcaattggaaaaagaacttagagaattagaggataatttccaagatgagcaaggtgaagatacagatcgaatgattcgtgaagttgtaacagacgaagaaattggcgatattgtcagccaatggacaggcataccagtttcaaaattagttgaaacagaacgtgaaaaattacttcacttaagtgatatcttgcataaacgtgttgtaggtcaagataaagcggttgacctggtttcagatgcagtagttagagctagagcaggtattaaagatccaaacagacctattggtagtttcttattcctaggtccaactggggtaggtaaaactgaattagctaaatcattagctgcatcattatttgattctgaaaaacatatgattcgtatcgatatgagtgaatatatggaaaaacatgcagtatcaagattgataggggcacctccaggatatattggacatgatgaagggggtcaattaactgaagcggttcgtcgtaatccatactcagttattttattagatgaggttgaaaaagcgcatactgacgtctttaatgtattattgcaaattttagatgaaggccgtttaactgattctaaaggacgtagcgttgattttaaaaatactattattattatgacaagtaatattggatctcaggttttattagaaaacgtaaaagagactggtgaaattacagaatcaacagaaaaagctgttatgacaagtttaaacgcatatttcaaaccagaaattttgaatcgtatggatgacatcgtattatttaaacctttatctattgatgatatgagtatgattgtagacaaaatattaacgcaattaaatataagattactagaacaacgaatctcaattgaagtttctgatgatgctaaagcttggctaggtcaagaagcttatgaacctcaatacggtgcaagaccattaaaacgttttgtacaacgccaaattgaaacaccattagcacgtatgatgattaaagaaggattcccagaaggtacaactattaaagttaatttaaattcagacaataacttaacgtttaatgttgaaaaaattcatgaataaaattgaaccaagaatgtgatgattaatcgcattcttggttttttagatttgaaatttattataattgttcattggcaatatactttttaaatgatttaataaacgccaatatttctggactttctttttggctgtatatatatgtaaatgaaataggtgcttgtaaaattttcgtgttaataaccaaaatattgtaatcactatttgttgttatataaataggcaggaatgatataccttgattcatttcgattaatttaattgaagtatgcacatcattgatagatagaaattgtgctttttcataaatatttaaaatattatttttaagtgatgaccaatattctggatggttatcacttattattttgtatttttcaaataaagatgcctcagttagaagatgattattctctttattgggagcaatcaatacaattttaccttcgcatactttttcagaatgaacttctcttagtttaggttgatttctgctaatcccaatatcatacgtatgattattaatatctttttcaatattttcatttttgacatgaagagaaacatcgataaaaggatgctcgttaaagaatgattttaaaaatttgggcataatgaatgtcgcgatatatgaagacacgacaacatttaatttcgattgaaacatcgtttttttaagttggatatgtttgatgccactttcatattgttcaataaaactttgtgcaattggaagaaatgtatgaccatcttcagtcaagataatttgatttttataagtttcaaatagtttcacattgagatgctgttctaaatttttaatttgcttatgtatagaaggtatagttagattaatttcttcactagctaatcgatagtttaacgtcttcgctaaaatgacaaatgtatagtaccaatccaaattcatgaacttacctctttcaaaaaagttaatgattcattagataatatttaatttttaatgcataaaaataatattaatattatatcagaggttaaggctgaatgaataaaaaattttacaaggagagagcaacatgaaaataaaaactgaatttaaagggaacaatataccatatgaatacgcagcaggtgcagatgtgagtgattctattaacgggaatccaattaaatcatttccatttgaagtaactgaattaccggaagggactaaatatcttgcttggtctttaattgactatgatgcaattcctgtgtgtggctttgcatggattcattggagtgttgctaatgtaggtgttagtggcaattcaatttctataaaagcagatttatcaagaacaaagggtgactatgtacaaggtaaaaatagctttactagtgggttgttggctgaagatttttcagaaatagaaaatcactatgtaggaccaacaccacctgataaagatcatcaatacgaattaacagtttatgcgttagatcattctttaaatttgaagaatgggttctacttgaatgaatttttaaaagaagtaaatcaacataaaattgatcaaacaagtattaaccttattggaagaaaaatttaatactaaatatctcatcaatataaaattgttcaattaaaagtatgaagaaacaagggatttaatttatatattaggtacggcgttcgctataatgcaaagaagtaattaaatttaagaaatgtaaacttagttattgtaatatgaatttatttgaaaaaatagaaagtattaacaattatagattttagatttattaaaattaatttttaaaaacaagtaaacaattcacatacttataatttttgaaacttttagatttgtgttatattgattttgtaagatactttaactcacaaaggagagagattatatgaaattaaaatcatttataactgtaactttggcactgggcatgatcgcaacgactggcgctactgtggcaagtaatgaggtatctgcagcagaaaaggacaaactaccggcaactcaaaaagctaaagaaatgcaaaatgttccatatacaattgcagtagatggcattatggctttcaatcaatcttacttaaatttaccaaaagatagccaattatcatatttagatttaggaaataaagttaaagctttattatatgatgaacgtggtgtaacacctgagaagattcgaaatgcaaaatcagccgtttacacgattacttggaaagatggcagtaaaaaagaagtggatttaaagaaagatagttatacagcaaacttgtttgattcaaattcaattaaacaaattgatgttaatgtaaaaactaaataaacacttaaaattatcaattcaacatgaagcatttaattttacagtgatgattataatataattgccttgatacaaagattactcgtaaatgacatctttgtattaaggctttttctatatttaaaagtgatgggatagaggtcattgagttttaaaatattcaaaatacaaaacattaatggccaaaaataaaagccgcctttatctgggcagcttcaataataagaaagacatatttcattttatactaaatagttattgtgatgaatctttcggcggtttaattactgcagcaaaaattgctgtgaaaatcgtgaacaatactgccatgataattggattcactaaatttaagctgtctccacctactaggctattaagtacaaagttaaccatttgcattaataataatgcccaaaagaatgttacgaggtgtttcatgtcattctacctccactttaattatatatattttattttaagtgaaagttagaaatttgtatagtaacatctcatatattttgaccatattatacagtttaaataaatgattttatctgaatggctattctaatttaagcccattaaaaccaatttcatactgaaatttgacgataataaagctttaaaattttattaactagtcaatattcctatctctgacttgagtttaaaaagtaatctatgttaaattaatacctggtattaaaaattttattaagaaggtgttcaactatgaacgtgggtattaaaggttttggtgcatatgcaccagaaaagattattgacaatgcctattttgagcaatttttagatacatctgatgaatggatttctaagatgactggaattaaagaaagacattgggcagatgacgatcaagatacttcagatttagcatatgaagcaagtgtaaaagcgatcgctgacgctggtattcagcccgaagatatagatatgataattgttgccacagcaactggagatatgccatttccaactgtcgcaaatatgttgcaagaacgtttagggacgggcaaagttgcctctatggatcaacttgcagcatgttctggatttatgtattcaatgattacagctaaacaatatgttcaatctggagattatcataatattttagttgtcggtgcagataaattatctaaaataacagatttaactgaccgttctactgcagttctatttggagatggtgcaggtgcggttatcatcggtgaagtttcagaaggtagaggtattattagttatgaaatgggttctgatggcactggtggtaaacatttatatttagataaagatactggtaaactgaaaatgaatggtcgagaagtatttaaatttgctgttagaattatgggtgatgcatcaacacgtgtagttgaaaaagcgaatttaacatcagatgatatagatttatttattcctcatcaagctaatattagaattatggaatcagcaagagaacgcttaggtatttcaaaagacaaaatgagtgtttctgtaaataaatatggaaatacttcagctgcgtcaatacctttaagtatcgatcaagaattaaaaaatggtaaactcaaagatgatgatacaattgttcttgtcggattcggtggcggcctaacttggggcgcaatgacaataaaatggggaaaataggaggataacgaatgagtcaaaataaaagagtagttattacaggtatgggagccctttctccaatcggtaatgatgtcaaaacaacatgggagaatgctctaaaaggcgtaaatggtatcgataaaattacacgtatcgatactgaaccttatagcgttcacttagcaggagaacttaaaaactttaatattgaagatcatatcgacaaaaaagaagcgcgtcgtatggatagatttactcaatatgcaattgtagcagctagagaggctgttaaagatgcgcaattagatatcaatgaaaatactgcagatcgaatcggtgtatggattggttctggtatcggtggtatggaaacatttgaaattgcacataaacaattaatggataaaggcccaagacgtgtgagtccatttttcgtaccaatgttaattcctgatatggcaactggacaagtatcaattgacttaggtgcaaaaggaccaaatggtgcaacagttacagcatgtgcaacaggtacaaactcaataggagaagcatttaaaattgtgcaacgcggtgatgcagatgcaatgattactggtggtacagaagcaccaattactcatatggcaattgcaggtttcagtgcaagtcgagcgctttctacaaatgatgacattgaaacagcatgtcgtccattccaagaaggtagagacggttttgttatgggtgaaggtgctggtattttagtaatcgaatcattagaatcagcacaagctcgaggtgccaatatttatgctgagatagttggctatggtactacaggtgatgcttatcatattacagcaccggctccagaaggtgaaggcggttctagagcaatgcaagcagctatggatgatgctggtattgaacctaaagatgtacaatacttaaatgcccatggtacaagtactcctgttggtgacttaaatgaagttaaagctattaaaaatacatttggtgaagcagctaaacacttaaaagttagctcaacaaaatcaatgactggtcacttacttggtgcaacaggtggaattgaagcaatcttctcagcgctttcaattaaaaactctaaagtcgcaccgacaattcatgcggtaactccagacccagaatgtgatttggatatagttccaaatgaagcgcaagaccttgatattacttatgcaatgagtaacagcttaggattcggtggacataacgcagtattagtattcaagaaatttgaagcataattataaaaatcttcagtaacgttgttttagttactgaagattttttcagtttctttatactaagatgagcgacagcacaatcgtcataataaaatataaaatatttattaataataatggtattatccatgtagaaacaaagtaatgctctttttttacctcttgtgggttgaaaaatggatcatcagagatagacttcttctttttcgaagatgacatttgatactttaatcttctaaaaccataacttgtcgcatcaaaaatgccttcttgtacaagtaaaatcaaaaaaatgctaataaaaataattaatgaaacataaaacaatatatttaaatatgtaatgatagtatggctattaaaaacccatataataaacgttaacattggggttattactgccattccaagccattttttcaacatttgatcactcccacatataaaaaactcttacgcatagtttacattaaaatgagacaatgaggaatgattttttaatttcttcagctttattgaaattctaaaatcaatcattcttcattagtttaaagcaaaaaaatattgatatatagtaaatattgtatatataatattagttaagatttcagaaaattttgaagggaatggaaatttagaaatcggaatttgttagaggaggggattagatggggaaatatatttttaaacgatttatttatatgcttatttctttatttattattattacaattacatttttcttaatgaaattaatgccaggttcgccatttaacgatgctaaattaaatgctgaacaaaaagaaattttaaatgaaaaatatggattaaatgatcctgtagctacgcagtatttacattatttaaaaaatgttgttacaggcgattttggtaattcattccaatatcataatcaacctgtgtgggatttgattaaaccgagactactaccttcttttgaaatgggacttacagcaatgttcatcggtgtgatactgggacttattttaggtgttgcagcagctactaaacaaaattcttgggttgactatacaactacagttatttcagttattgcagtatctgtaccatcttttgtacttgctgttcttttacaatatgtatttgcagttaaattaagatggttcccagtagctgggtgggaaggtttttcgaccgcggtattaccgtcacttgcattatctgcagctgttttagcaactgtcgccagatacataagagcagagatgatagaggtattaagttcagactacattttattagcgagagctaaaggtaattcgacaatgcgtgtactttttggacatgcacttagaaatgctttaattccaattattacaattatcgttcctatgttagcaagtattttaacaggcactttaacaattgaaaatatttttggggttcctggattaggggatcaattcgtacgttcaattacaacaaatgatttctcagtaatcatggcaatcacactattatttagcacattgtttatcgtttctatttttattgtagatattttgtacggtgtgatagatccacgaattcgtgttcaaggaggtaaaaaataatggctgaaaataaaaacaatttgtcgattaacgacgatcattctaatgcagctatgacgcatacctctgacgctatcgcatcatctgattttattattagaaaattagatttgaatcaggaacctgaaatgcaacgagaaagcaaaaacttttggcaagatgcttgggctcagttaaaacgaaataagttagctgttgtcggtatgataggtttaattatcattgtaatatttgcttttatcggtccagttataaataaacatgattatgctgaacaaaatgtacaacatagaaatctcccggcaaaaatacctgtattagacaaagttccatttttaccttttgatggtaaagatgcagatggcaaggatgcttataaagcagcaaatgctaaagaaaattattggtttggtactgatcagttgggtcgagatttatggacaagaacatggaaaggtgctcaaatttcattgtttatcggtgttgttgcagcgatgttagatatttttattggcgttgtatatggtgcgatttctggattcttcggtggacgtgtcgatacgattatgcaacgtatacttgaagtcatagcatctattccgaatttaattgtcgtaattttatttgtattaatttttgaaccatccatttggacaattatattggctatgtctatcacaggctggttaggcatgagcagagttgtacgtggagaatttttaaaattgaaaaatcaagagtttgtcatggcttcgaaaacattgggggcttcaaaattcaaattgatatttaagcatattttacctaatacgttaggtgctatcgtggttacatcaatgtttacagtacctagtgctattttcttcgaagcatttttaagtttcattggtataggtgtacccgcacctcaaacatctcttggttcattagtcaatgacggacgtgcaatgttattaatttatccacatgaattatttataccagcaatgattttaagtttattaattctattcttttacttatttagtgatggattacgtgatgcatttgatccgaaaatgcgtaaataaaagggggcatagcatatgactgaaagaatattagaagtaaatgatttgtatgtttcctttgatattacagcaggggaagtgcaggcagtgagaggtgtagatttttatttaaacaaaggggaaacattggcaattgttggtgaatcaggttcaggtaaatctgtaacaacaaaagcaattacaaaattattccaaggggacacaggaagaattaaaaagggagaaattttatttttaggggaagatttagcaaaaaaacctgaaaatgagttaattaaattacgtggcaaagatatttcaatgatctttcaagatccaatgacatctttaaacccaacgatgcaaattggtaaacaagtcatggaaccactcatgaagcataaaaattatagtaaatcagaagcaaagaagcgcgcattagaaattttgaatcttgtaggtttaccaaatgctgaaaaacgatttaaagcatatcctcatcagttttcaggtggccaaagacaaagaattgttattgctacagctttagcatgtgaaccgaaagtacttattgctgatgaacctacaacagcacttgatgttacgatgcaggcacaaattttagatttaatgaaagagctgcaacaaaaaattgatacagcgattatctttattacgcatgatttaggggttgttgcgaatatcgctgatagagttgcagttatgtatggcggtcaaatggttgaaacaggagatgttaatgagatattttatgaccccaaacatccatatacttggggactcttatcatcaatgcctgatttatcaacaacaaatgacacaccattattagcaattccgggttcgccacctgatttattacatccacctcaaggtgatgcatttgctagacgtagtcaatatgcattagatattgattttaaagtagaaccaccgtggtttaaagtttcaccgacacattttgtgaaatcttggttattagacgcacgtgcaccaaaagttgaactacccgagttggtaaaacaacgtatgaaaccgatgcctaataattatgaaaaaccactcaaggtagaaagggtgtcgttcaatgagaactgatgaaatattactatcgattaaaaatttaaagcaatattttaacgcaggaaagaaaaacgaagtgagagcaattgaaaatatttcgtttgatatatacaaaggggaaacattaggtttagtaggagaatcggggtgtggtaaatctacaactggtaaatcaattatcaaacttaatgatattacaagtggagaaattttgtatgagggtattgatatacaaaagattcgtaaacgtaaagatttgcttaaatttaataaaaagatacagatgatttttcaagacccatatgcgtctttaaatcctaggttaaaagtaatggatatagtagctgaaggtattgatatccatcatttagctagtgataaacgtgaccgtaaaaagcgtgtttatgatttacttgaaactgttggattaagtaaagaacatgccaatcgttatccgcacgaattttcaggtggacaacgccaacgtattggaattgcccgtgcattagccgttgaaccagaatttattatagcagatgaacctatttcagcattggatgtttcaattcaagctcaagtagtcaatttgttattaaaattacagcgtgaaaaaggtattacattcctatttattgcacatgatttatcaatggtgaagtatatctctgatcgaattgcagtcatgcattttgggaaaattgtagaaatcggaccagcagacgatatttatcaatatccattacatgattatactaagtctttattgtcggcaattcctcaaccggatcctgaatcggaacgtagtcgtaaacgatttagttatattgatgatgaagcaaataatcatttaagacaattacatgaaataagaccacagcattttgtctttagtactgaagaagaagcggcacgactacaaaaaaatttgttggtgacacaagattaaggggaagggggaaatgaaatgacaagaaagttgaaagcgctaattttaatattggttgccacaattgcattaagtggttgtgctaatgatgatggtatttattcagataaagggcaagtattcagaaaaattttgtcatcagacttaacatcccttgatacatcattaataacggatgaaatatcttctgaagtgacagcgcaaacattcgaaggtttatacacattaggaaaaggtgacaaaccggtgttaggtgttgcgaaagcttttcctgaaaagagtaaagatggtaaaacgttaaaggttaaattaagaagcgatgctaaatggagcaatggtgacaaagtgactgcacaagactttgtttatgcttggagaaaaacagttgaccctaaaacaggttctgaatttgcatacattatgggggacattaaaaatgcgagtgatattagtactggtaagaaacctgtagagcaattaggtatcaaagcattagatgatgaaacattacaaattgaattagaaaagccggttccatatattaatcaattattagcacttaatacatttgcacctcaaaatgaaaaagttgccaaaaaatatggtaaaaattacggtacggcagctgatagagcggtatacaatggtccatttaaagttgatgattggaaacaagaagataaaacgttactatctaaaaatcagtattattgggataaaaagaaagtaaaattagataaagtgaattataaagttattaaagacttacaagcaggtgcatcattgtatgatactgaatcagtagatgacgcagttattacagcagatcaagtaaataaatataaagataataaaggattaaactttgtgttaacgactgggacattttttgtaaaaatgaatgaaaaacaatatcctgattttaaaaacaaaaatttaagactggctatcgcacaagcaatagataaaaaaggatacgttgattcagtgaaaaacaatggttcaatcccttccgatacactaacagccaaaggcattgcgaaagcacctaatggcaaagattatgcgagtaccatgaattcacctctaaaatataatcctaaagaagcaagagcacactgggacaaagctaaaaaagagttaggtaaaaatgaattgacattttcaatgaacacagaagatacaccagatgcaaaaatatctgctgaatatatcaaatcgcaagttgagaaaaatttaccaggagttactttgaaaattaagcaattaccatttaaacaaagagtatcactagaactgagtaacaattttgaagcatcgcttagtggttggtctgcagattaccctgatcctatggcttatttagaaacaatgaccacaggtagcgcacaaaataatacagactggggtaataaagaatacgatcaattacttaaagtagcaagaaccgaattggcgcttcaaccgaacgaacgatatgaaaacttgaaaaaagcagaagaaatattcctaggagatgcaccggtagcaccaatttatcaaaaaggtgttgcacatttaacaaatcctcaagtaaaaggattaatttaccataaatttggtccaaataactcacttaaacatgtatatattgataaatcgatagataaagaaacaggtaaaaagaaaaaataatttgttttgtaaattaggctggagacatatctccagtctttttgtattgcagaaaaacattgggaataaaaatttaaaataagtcggtttttaaattactgaaattgattaaatgcataaatgactgaatattctaaaaataaacttgtaataattttttctatgagtaaactaaaaagaaaatattagattgaaagtaggaggcatatgtatggggaagcttattaaatatatttcaatacttcttattgtcgttttagtgttgagtgcttgcggaaaaagcagtaataaagatgaaggagtaaaagatgctactaaaacagaagcgtcaaaacataaaggtggtacgctaaatgtagcgttaacagcaccgccaagtggtgtttattcttcgttattaaatagtacacatgcggacgctgtagttgaaggatattttaacgaaagtttattagcaattgataaaaaaatacgtcctaaagcttatattgcgtcatggaaggacatcgagccggctaagaaaatagaatttaaaattaaaaaaggtattaaatggcatgatggtaatgaattgaaaattgatgattggatttattcaattgaagtcttagctaacaaggattacgaaggtgcttattatccaagtgtagaaaatatccaaggtgcaaaagattatcatgaaggaaaagctgatcatattagcggattgaagaaaatagatgactacacaatgcaggttacatttgataaaaagcaagaaaattacttaacaggatttattactggacctttattaagtaaaaaatatttatcagatgtaccaattaaagatttagcgaaatcagataaaatccgaaaatatcctattggtattggaccatataaagttaagaaaatcgtcccaggtgaggctgttcaacttgttaaatttgatgattattggcaaggtaagcctgcattagacaaaatcaatttaaaagttattgatcaagctcaaattattaaggcaatggaaaaaggcgatattgatgttgcgaatgatgctaccggtgcaatggcaaaagatgctaagtcatctaatgctggtctcaaggtattatctgcgccaagcttagactacggtttaataggattcgtatctcatgattacgataaaaaagctaataaaactggtaaagtgagaccaaaatatgaagacaaagaattacgtaaagcaatgctttatgcaattgatagagaaaaatggatcaaagcatttttcaatggttacgctagtgaaataaatagttttgtaccatcaatgcattggatagcagctgatcctaaggaactaaacgattataaatatgatcctgaaaaagctaaaaaaatcttagataagttaggttataaagatcgagatggtgacggatttagagaagatcctaaaggtaataaatttgagattaactttaaacattattcaggttcaaatcctacttttgaaccaagaactgctgcgataaaagatttctgggaaaaagttggcttgaaaacaaatgtgaagttagtagaattcggtaaatataatgaagacttagcaaatgcatcaaaagatatggaagtgtacttcagatcatgggcaggtggtacagatccagacccatcagatttataccacactgatagacctcaaaatgaaatgagaacagttttaccaaaatcagatcaatatttagatgatgcattagacttcgataaagtaggcattgatgaaaagaaacgtaaagatatttatgttaaatggcaaaaatatatgattgatgagttacctggattaccaatgttccaaggtaaatcgataactatagttaatgataaagtacgaaacttagacattgaaattggtactgatcaaagtttatataatttaactaaagaagcttagtaatgtaacctcgacgattttgtcgaggtttacttatatggggggatgttatgaataatgtattgttagaggttaaagatttagaaacatcattaaaaataaataatgaatggttagcaactgttgaaaatatttcttttgaattatctaaaggagaagttttgggtatagtaggggaatctggttgcggtaagtcaatattaagtaagtcaattattaaattattaccagaaaagatatctaaactaagtaatggagaagttatatttgatggtaaacgaatcgatacgctaaatgagaagcaattgctagatattcgaggaaatgatattgctatgatttttcaagaacctatgactgctttaaatccggtatttaccataaaaaatcaactagtggaatctataaaatcccataaaaaaatttctaaaaaagaagcaaataacttagcaaaagatttactaaaaaaagttggaattgcaagacaagatgaaatattaaatagctatcctcatcaattatctggtggtatgaggcaaagagtaatgattgcaatggccatttcatgttctcctaaattattaattgctgatgaacctacaactgcattggatgttacgattcaagcgcaaatattagatttattaaaagaattgcaaaaggaaacgcaaatggcaattatgatgattacacatgatttgagtgtagttgctgagttttgcgataaagtcttggttatgtatgcaggtcaaattgtagaatttggagatataaaagaaatactacacaatccgaaacatccttatacccaaaaattattatctacaattccaaaacttaaagaagaacagaaacgacttgaaacaatagaaggaattgtgccatcaatccaagcatttcacgttaataagtgcagatttgcaaatagatgtaacaaaaaactggatatttgtaataatcaatctcctaaaatgcatgtttgtgaagacgtcattgtacggtgtcatttataccaaaatgaatataaggagatataagaatggaaaatattttagaagtaaatcaagtaaaaaaatactacaaaattaaaactggattattacaaaaaactcagtacgttaaagctgttgatgacgtatcgttttcaataaaaaaaggacagacttttggattagtaggcgaatcaggttgtggtaagtcaacgttaggaaaagtgattatcagacttgaagatgcaacttcaggctcaataattgttaatggtaaagatataacaagattacaaggtaataaactaagaaaatcacgacaacaatatcagatgatatttcaagatccatatgcatcattgaatccgatgcaaatggttggagatatcatttcagaacctattttaaattataaaaaattgccaaaagaagaaataaaaaaagaagttctatatttattaaaatgtgttggtctaagtgaagatgcatattataaatatgcacatgaattttcaggtggacagagacaaagagtgggaattgcaagagcactggctttgcgtccgagtttaattgttgctgatgagcctgtaagtgcattagatgtatctgttcaatctcaagtactgaatttattaaaagatttacaagaacaatttaacttaagctatttatttatcgcacatgatttaagtgtagtaaaacatataagtgatgtcattggagttatgtatttaggtcatatagttgaaatcgcatctgataaagaaatttatgaaaatcccaaacatccatatacaaaagcattaatttcatcaataccacaaattgataaacataataacaatagaattatattaaaaggagaattaccttcgccaagtaatccgccgcaaggttgtcctttccatactagatgtccaattgctcaagataaatgtaaagaaaatataccacaattaaaagacataggtgatgaacatcaagttgcttgtttctacttagataaagtaggtgatttaaatgattaaattaatacttaaaaggttagggttaatgatcccgttactaattttaatctcaatagttgtattttcattagcaatcatacaaccaggagatccattttcagatttacaaaacggtaaaataaaacaagaagcaataaatgcacaaagggaaaaattaggtctcaacgactcaataccacatcaatacattagatgggtcaatcatgttatacacggtgatttaggggagtcaatcaaatataaaaggccggtaattgatgttattgaggaaagaattccaaatacaatattactcggtgctatgtcattaattattacttatattatctcatttgctttaggaataacgtcaggtagatattcttacagtttgacggattatactgtgcaaatatttaattatttgatgttagccattccatcttttattgcgggagtatttgcaatttttattttttcttttgaattacaatggttcccgtttcaaggttctgttgatattaaccttaaagaaggtacctttgaatattatatgagtaaaatttatcatacatttttacctgcattaactttaggattattatctactgctggttatattcaatatttacgtaatgatattattgaaaattctaaaaaagattatgtattgacggcaaggtcaaaaggattatctatgaataaaatttataataaacatatattgagaaattctctaatacctattattacatttttaggtgctgatattgtcagtattttaggtggagctgtgattactgagacgattttttcatataacggtatcggtaaattatttttagaatcggtaataggtcaagactatccattaatgatggcattaacgttatttttctcatttttaggtttactgggtaatttgatttctgatattacttatggatttatagatccaagaattagaagtaactaggggggattagaatgcaaaataagtcaaaatcgccttttaaaattgcattgtctaaatttattcataataaaattgcaatgttatcgattatttttttattaatcataactattgtatcaattatagcgccattaatagctccttttccagtgaaccaacaagatttattaaatataaaaggtgaaatgacagcacaaaacattcttggtacagactctggtggtagggataactttagtcgtttgttatatgcaggtcgtatttcattatccattggaattacatctacaataggaatgcttttgattggaattacagttggagtgatttctggttattttggaggtattgttgatacattattaatgagaataaccgaatttgttatgttatttccatttttaatatttgcaattgtattaaatgctgcacttggagataaaattaaaaatccttatggatctgccataattcttgttctagttattatcgtattaagttggggaggtattgcaagacttgttcgtggtaaagtacttcaagaaaaagaaaatgaatactttttagcagcaaaatcaattggtacacctacatataaagttattttgaaacatcttttgccgaatatattaagtgtagttatcgtacaagcaacattgttatttgccggtatgattgtagtggaatcaggattgagctttttaggattcggaataagtaaagcaatcccatcttggggtaatatgttgagtgatgctcaagaaggggatgttataagtggtaaaccgtggatatggatgccacctgctataatgattacattaactatattaagtataaactttgtaggggaagggcttaaagatgcttttaatcctagaggtagacgttaaataataaaagaggcactagttaattctagtacctctttattttatctcttacgtcctaaacccatcgctttttccattttcttgacagttttaaatgaaactttgtgtgctttatctctaccttgatctaaaatattatcaagtttatctgagttatagaaactttcgtatttttcttggaattctactaaaaatgctttaactatttcagcaaggtcgcctttgaatttaccgtaaccttcgccttcatattttacctcaatatctttaataggcatgtctgttaatccagcgtatattgaaattaaatttgtaatacctggtttattgtcgcggtcgaatttaataataccgtctgaatcagtcacagcacttttaatttttttagcagcaacatttggttcgtctaataatgaaataaagtttttagcgttgtcatcacttttgctcatttttcttgttggatcttgtaaactcataacacggccaccaactttaggcatacgaatttcaggtttcacaaggacatcattataacgactattaaatctatctacaagattacgtgttaattcaatgtgctgcttttggtcatcgccaactggaacgatattagtattgtaaagaacaatatcagctgccattaaaggtggatatgttaatagaccagctggtataccttcaactgctttctgagctttatctttgtattgcgtcatacgctctaattctccgacagaagcaattgtagttaacatccatcctgcttgtacgtgtgcagggacttcagattgtatgaacaatgttgctttgtctggatctataccagaagctaaataaatcgctgctaattgtctagtttgtttacgtaattttaagcgatcttgtggcattgtaattgcatgttgatctacgatacagaaataacaatcatagtcgttttgcacatcaacaaattgctttaatgcgccaatataatttccaatagtaggaattccactaggttgaatgcctgaaaataatgtttccatttaaatgcctactttcttagtaataatttaacaattatcattataacagtatttcttaaaaatgtaagatgtgttagaatatatgtataacttgctactaacaaagggatttattaccttaaaaataagtgtagaaacttatctgaaaaattaggtttttctcatttaattttaatgttagatagttataataaatagtaacgattaagaattttagaaaaaaatgttttttcttgatctataactaaattttaagcaatgaattttattcattcaaataggagagtgagatgtatggtaacattatttacttcaccaagttgcacatcttgccgtaaagcgaaagcatggttacaagaacatgacattccgtatacggagcgtaatattttttctgaacatttaacaattgatgaaattaagcaaatattaaaaatgactgaagacggtactgatgaaatcatttctacacgttctaaaacataccaaaaattaaatgttgatattgattcactaccattacaagacttatattcaatcattcaagataatcctggcttattacgtcgtccaattattttagataataaacgactacaagttggttataatgaggacgagattcgacgtttcttacctagaaaagttcgtacgttccaattacaagaagcacaacgtatggttgactaataaccatttaactatgtgtcatactttactaaaagatatgtcaagcaacactatttctatagtgttgcttttttggttttaattttacaataattgcttagtatcttttaaatcaaatgtgcaattgttaatatagctctatatttagagtgttttggatgaaacatttgctatgataaggtaaaattaaattaagaaagtgctttaatgctttaactgtataaatcatttaaatagttttgctacaacgaatatgttattataagttaccaaaatattttagagaaagaaatcaaacaaatatattgtattttgtttgatgctttaatacaatgtggatactattcatcgactgtaaggagtgagatgatatgagaatagaacgagtagatgatacaactgtaaaattgtttataacatatagcgatatcgaggcccgtggatttagtcgtgaagatttatggacaaatcgcaaacgtggcgaagaattcttttggtcaatgatggatgaaattaacgaagaagaagattttgttgtagaaggtccattatggattcaagtacatgcctttgaaaaaggtgtcgaagtcacaatttctaaatctaaaaatgaagatatgatgaatatgtctgatgatgatgcaactgatcaatttgatgaacaagttcaagaattgttagctcaaacattagaaggtgaagatcaattagaagaattattcgagcaacgaacaaaagaaaaagaagctcaaggttctaaacgtcaaaagtcttcagcacgtaaaaatacaagaacaattattgtgaaatttaacgatttagaagatgttattaattatgcatatcatagcaatccaataactacagagtttgaagatttgttatatatggttgatggtacttattattatgctgtacattttgatagtcatgttgatcaagaggtcattaatgatagttacagtcaattgcttgaatttgcttatccaacagacagaacagaagtttatttaaatgactatgctaaaataattatgagtcataatgtaacagctcaagttcgacgttattttccagagacaactgaataacgatattaattaagcaacgcactatgaaaggagactctttggagtctctttttttattgatttcaaaagctgaaaaagtaatagtagttaaacttacgtgtaatattttgaggtgaagatatgttagtagctttaaatgaagaaaaggaacgtgtgttagcaactactgcattgagaaagataaaatatttttgtccggtgtgtggcaagcaagttattttaaagcgtgggctcaaagtaattagtcattttgcacataaacatttaacggaacaaaaatgttttaataatgaatcgtttaaacattataaaagtaaattgattttagcacagatgatacagcaacaaggatgtaaagtagagatagaaccatttttaaaagaaataaaacaaattccggatattttgattaataataaatatgttattgagctacagtattcgccaattccttataaacagattcttcaacgaacggaaggtttaaagaaaatgggatataaagtaagttggttattaaatgatgttgattattgtcataataaagtgaagttcaatcattttcaaagtatatttattaatccaatcactcgaaaacttcatacgttcaatttagagaaaaaacaaataatgatgtttcaacaaatacaatatttaggcgggcacaaatatgtcgctgaaaaaaggaatgccaaaattagtgagttgtttaatgaggcgccttgtgattatcatgctgtttataaattatcaaagttcgcaattaatcaatatatcaaatactgtcgctggcaaaattctgttttagaacccactttaagtgcaatgtatcaattacagttaactgatcaagaagtagtgcacaattatggttatatttttccagagcaaatttatattgaaaatcatccaattgagtggcaattacaagttgatttatggttaaagaatggaaaaagcaaattactaagtgacaatcttaattattttaaactgaaaaagtttattgttgctctagaaagtaaaacagcaattatagaaaaacttattaacaattatttaaatattagttcaaatagaggtaatgacgtgcaaattttgttctaaaatgagaaaattatatcaattatattttattaggaggtttactacatatgagtcaacaattatcgagagaagaacaggaacgtaaatatcctgaatatacatgggacttaacaacaattttcaaagatgatgaagcttttgaggctgcatttaaagaagttgaaaatgagttaggcaaagaagaacaatttaaagggcacattggtgatagtgctgagacattatacaatgcgttagaattagaagatacattaggtactaaattagaaaaagtatatgtatacgcacatctaaaacaagaccaagatacaacgaacgacaagtatactggtatggagtcaagagcacatcaattaattattaaatttagctcggcatggagtttcttagtgccagagattttacaaattgatgaagataaaattcaatcatttgtaaattcatatgataaattacaaaaattcgcatttgatttgaagttgattaatgaaaaacgtcctcatattttagatgctgaaactgaaaagttattaacagaagcgcaggacgcgttatcaacaccatcaaatgtatacggtatgtttagcaacgctgatttagtatttgaagatgcgattgataaagatggaaatgcacatccgttaacacaaggcacatttattaagtatttagaatcagatgatcgcaaactaagagaaagtgcttttagaaatgtatataaagcatatggtgctcataataatacgcttggcgctacgctagcaggtgaagtgaagaaaaatgtatttaatgctcgtacacacaattacaaaactgcaagagaaaaagcattgagtaataatcatattccagaaaatgtatatgacaatctagtaaaaactgtacataaatatttaccattgctacatagatatactgaattgcgcaaagaattgctaggtttagatgacttgaaaatgtatgatttatatacaccattaattaaagatattaagtttgaaatgccttatgaagaagctaaagagtggatgttaaaagctttagaaccaatgggtgaagaatatttaaatgtagttaaagaaggcttaaacaatcgttgggtcgatgtctatgagaataaaggtaaacgttcaggtggctattcatcaggtgcacatttaactaatccatttattctacttaactggtctaatactatttcagacttatacacattagttcatgaatttggacattcagcacatagttacttcagtagaaaattccaaccgtcaaattctagtgactacactatttttgtcgctgaagttgcatcaacttgtaacgaagcacttttaagtgattatatggataaacatcttgatgatgaaaaacgcttattattattaaaccaagaattagaacgtttcagagctacattattccgacaaacaatgttcgcagaatttgagcataaaattcatgccattgaagaagcaggtgaaccattaacgccaactagaatgaatgaagaatatgccaaattaaataaattatacttcggtgattctgtagaaactgatgaagatattagtaaggaatggtcacgtattccacacttctatatgaattattatgtatatcaatacgcaactggttacagtgcagctcaaagcttaagtcatcaaattttaacagaaggtaagccagcagtagatagatatattaatgaattcttgaaaaaaggtagctcaaattatccaattgagatattaaaaaatgctggtgtagatatgacaacacctgaaccaattgaacaagcttgtgaagttttcgaacaaaaattgaacgcttttgaaaaattaatgaaagcttagcgctgttgtattcgcttacattatgaacagattgtgacaatttaaattaagtactattaaaaggttgaaatgggagagatagcgtgttatattatgaacatgaaattaatcacataacaaacatacccctttgtttgaagtgaaaaatttctcccatcccctttgtttagcgtcgtgtattcagacacgacgtttttttatgttcttttttaataagagggaagtgacgttgtataaaaatgtattaaatttgcactttttatacattaacgattaatatatgtctattatgtaccaaatttataatttgtataattttcgaactggttaaattcgaaaaacatcactattatatttagatcgatgcgtaacattacgttttaataatttaatgttgcaaaattaagagtcaataaaaagacctcgttacatttatggtgtacgaggtctttaatttatttattttgatttgattttaggcattttagatttccagaaatcgccatctggatatttaagtttttcaattttttgttgaatagctaacttttttaactctttgtttaaaagtttttctggccattcataaatagtaagtaattcttccatcgttacaagttgttgttgctgtatataagtttctagtttaggaggaagattcttttcgataggtttacccatcaattcattaattatataagtatagatatgatatgggtataatccttcgacttttaaaccttcttcatgaacatcttcactaaagaaaacgagagaaggggcttgttcgatttccatttctcttgcaatatgcaaatcaattttcaagctttcggttagtttgcttttttgtaagtcgtctttaaatacttctaaatcaatacctgcattttgaatacagtcacaaatcattgattctgtaataatatctcttttaggtatgatttcattttgcattaaatgtataaatcgttccgcacgtacacgaccttgtaactcagctgctttataagctagggcgatgttatcaaagttggatgtactttgagcttggcatttcgttaatacttttaacgaaggatttaatatatgtctgatacgtatatattgattatattcaattcttaatttggataagattgctgataatttaaagcaatcggagctaaatggatcgaaaaatgaataaatttcgattttacttacaggtgatagattaatatcttcacgactcttattttccattattcgtaattctccagccatgtttattcacctacaattaattttaggaattcaccatatgattagcagttaatcttaagcgctcaaataaataatctccaacaccttgtggaaacgcagcgcgattaattgctgtctgcatattttctaaccatgcatctctttcaaattcagttattgtaaacgccatatgtctttttcttagcataggatgtccgtgttcttcggtataaatgtttggaccgcccaaaaactgtgttaaaaattgtttttgtttacgacttgtttctgcaaaatctcctgggaacaggtgattaagtcgttcatctttttctacaagggtgtaaaaataatcaatcatatcgtataacgcttctttaccaatgatgtcatatggtgttgttgtcatttaatcacccattttcaaaaatttactgttacggacttaagttaatatataactaatataacatgattttaaacatttgaaagaaatatgcatatttgccaatttaatttatattgtttgaaagtgtttcttttttcttaaaaaaacgttgaactttatttaaaggttgatgatgttcgaggtttagttcgtttaataaagattggaacttttgtaaaccttgattatagtctttaacttcgaactctaactcataatccgtagtatcgaaatactcacttttatctaaaacaagtaaatcacctttatatttagtttcttggcgatatgtcgttaatgcgccaagtattgataaagttgtatcctttacaccaaactgttcaactacaatttgacgaatgtcatctggaagattgtcgtttgaaataatcaagttcatctctggtttaatgtcgacgatatagttgtattctaatagaccaacctttgctggtgtctttaaagtcatttcatattgattgtctttaactcttatgcgtagtgcagagcaatgttcctttaatttgaaatcgggtgtatcaatatagtaattgacttgcttaaacagtacactgtctttaaaatatttctcttgcaatttattatagattgatgcagttatcatttgtttaaattctatttcatgatttgttgccatgatatgtatacacctcgtatcaaattcaatttatcttaactatattatgaatgacaaagttgaattttaaaagtaatttcctttatctattatcaatgttagtttgaccattaaaaatagtgttcgtaagtgttttgtattattgaattgtgttaaaatgttatggaataagaggaggattaagcatgcgtttatatattaatgaaattaaaattaaagatgacatactttattgttatacagaagattctattaaaggattatctgaagtaggacaaatgctcgttgatagtgataattatgcctttgcgtatacattagatgatggtaaagcgtatgcttatctcattttcgtacaagaaacatggacgatgttgcatgaaaacatgactaaaaaaattattatcaatgatgaactagaattgactgaattccaccaagaacttacttatattttagacaacataaaagggaataataattatggtaaggaatttgttgcaaccgttgaagaaacattcgacattgaataaagcggggtgaagcactatgaatcaatgggatcagttcttaacaccttataagcaagcggttgatgagttgaaagtgaaacttaaaggcatgcgcaaacaatatgaagttggtgaacaagcgtcgccaatagaatttgttactggtcgtgttaaaccaatcgctagtattatagataaggcaaacaaacgacaaataccatttgataggttaagagaagaaatgtacgatatcgctggtttaagaatgatgtgccaatttgttgaagatattgatgttgtcgtcaatattttaagacaaagaaaagattttaaagtaattgaagaacgagattatattcgtaacactaaagagagtggttaccggtcgtatcatgtcattattgaatatccaattgaaacattacaaggccaaaaatttatattggctgagattcagattcgtacattagcaatgaatttctgggcaacgattgaacatactttacgatataaatatgatggtgcttatccggatgaaattcaacatcgtttggaaagagcggcagaagcagcgtatttacttgatgaagagatgtctgaaattaaagatgaaattcaggaagctcaaaaatattacacgcaaaaacgttctaaaaaacatgaaaatgattaacgaggtgttataaatcatgcgttatacaattttaactaaaggtgactccaagtctaatgccttaaagcataaaatgatgaactatatgaaagattttcgcatgattgaggatagtgaaaatcctgaaattgttatttcagttggtggtgatggtacattactacaagcattccatcaatatagccacatgttatcaaaagtggcatttgttggagttcatacaggtcatttaggattttatgcggattggttacctcatgaagttgaaaaattaatcatcgaaattaataattcagagtttcaggtcattgaatatccattgcttgaaattattatgagatacaacgacaacggctatgaaacaaggtatttagcattaaatgaagcaacgatgaaaactgaaaatggctcaacacttgttgtggatgttaacttaagagggaaacactttgagcgatttagaggcgatggattatgtgtatcaacaccttcgggttcaacggcttataacaaagcgctaggtggcgcgctgatacatccttcacttgaagcaatgcaaattacagaaattgcctcaataaataatcgtgtgtttagaacggtaggatcaccacttgtattaccaaagcatcatacatgtttaatatcaccagttaatcatgataccattagaatgacgatagatcatgttagtatcaaacataaaaatgttaattcaatacaataccgtgtagcaaatgaaaaagtgaggtttgcacgttttagaccattcccattctggaaacgtgtacacgattctttcatatcaagtgatgaagaacgatgaaatttaagtatcatatatcgcaacaagaaactgttaaaacttttttagcacgacatgatttttctaagaagacagtgagcgccattaaaaataatggcgctttaattgttaatgatgaaccagtcacagtgcgtaagcaattaatgccaaatgatatattagaaattcatttaccgcgagaaataccgagtgttaatttaataccttatgctcgtaagctagaagtattgtatgaagatgcttttatcatcatagttactaaaccaaacaatcaaaattgtacgccttcgagagaacatcctcatgaaagtttaatcgaacaagtactatatcattgtcaggaacatggtgaaaatattaacccacatattgttacgcgtctagatcgtaatacaactggtattgtgatattcgctaaatatggacatatccatcatttattttctaaagtaaacttgaaaaaaatatatacttgccttgtatatggtaaaacccatacatctggtattattgaagctaatattagacggtcaaaggatagtattataactagagaagttgcctcggatggtaaatacgctaaaacatcttatgaagtaataaatcagaatgataaatacagtttatgcaaagttcatttgcatacgggtcgtacacatcaaattcgtgtacattttcaacatattgggcatccaattgtgggagattctttgtatgatggttttcatgataaaattcatggtcaagtactgcaatgtacgcaaatatattttgttcatccaatcaataagaacaatatttatattacaattgattataagcaattacttaaattattcaatcaactctaattcacacagggggtgtaagtatgtcaatgaacacagatgaaaaagagcgtgttcaagaggaattatacgaccaaactttattagatcaatacttagaaaatgatgatattgatcaatttagagatgaatttctagcattacacacatatgaacaaagtgagtattttgaagatactaccgatgaaaatagacaaaagatttttcaatatttatcacctgaagaagttgcaaatttctttgatcaattagatattgatgacgatgaatatgagttgctatttgataagatgaatgcgacatacgcaagtcacatattagaagaaatgtcatacgacaatgcagtagatattttaaatgagttgactaaaccaaaagttgctagtcttttaacattgatgaataaagatgacgcgaatgaaatcaaagcattacttcactatgatgaggatacggccggcggtattatgacgacggagtatttatcacttaaagcgcatacgcctgttaaagaagcgttattattggtcaaagcgcaagcgccagacgcagaaacaatatatgttatctttgtcgttgatgatgatggtaaattagtaggtgttttatcgctaagagatttaattgtagctgaaaatgatgcttatattgaagatattatgaatgaacgtgtcattagtgtgaatgtagcagacgaccaagaagatgttgctcaagttatgagagactatgatttcatggctgtacctgttatagattaccaagaccatttgcttggtatcatcacgattgatgatattttagacgttatggatgaagaggctagtgaagactactctcgtttagccggggtttcagatatcgattcgactaatgattcaatcattaaaacagcattaaagcgtttaccatggttgattattttaacatttttaggaatgattactgcgacaattttagggagattcgaaaaaacattagaaaatgtagcgctactcgcagcgtttattcctattattagtggtatgtcaggaaattcaggtacacaatctttagccgtttcagttcgtaacattacgacaggggaaattaatgagcaaagtaaatttagaattgcattaagagaagcgggaagtggtgtattatcaggtgttgtatgttcaacaatattatttacaattattgttgcaatatatcatcagccacttttagcattaatcgttgcaggaagtttaacttgtgcgatgacggtggggacgtttgtaggttcgatgattccattattgatgaataaattgaatatcgatccagcagtggctagtggaccatttattacaacaattaatgatattattagtatgttgatttattttggtttagctacatcatttatggcttacttaatttaaggaggagttatggagtttttatctttagttattgttgttttagcagcgtttttaactccaataattgtcaatcgattaaatattaatttcttgccagttgttgttgcagaaattttgatggggattgtgattggaaattcatttctaaatatagtagaaagggattcaattctaaatattttatcaacgttaggctttatctttttaatgtttttaagtggtttagaaattgattttaaagcttttaaaaaagataaacgcgcacgtcaaggacaaaatgatgatgaatcctcaattccagggcatcttaatctagcgttaactgtatttgcatttattatgattatttcgattcttttagcgtatgtatttaaatggcttggattagtggatgatgtgttattaatggtcattatcatttcaactatttccttaggtgtagttgttccaactttaaaagaaatgaatattatgagaacaactataggtcaatttatcttattagtagcagtacttgcggacttagtaactatgattttattaacggtctatggtgcaatcaatggtcaaggcggcagtacaatatggttaataggtatattagttgttttcacagcaatttcatatattttaggtgttcaatttaaaagaatgtcatttttacaaaaattgatggatggtacgactcaaatcggtattcgtgcggtgtttgcattaataatattattagtagccctagcagagggagttggcgcagaaaatatattaggtgcattcttagcaggtgtcgttgtttcattattaaatccagatgaagaaatggttgaaaagttagactcatttggttatgggttctttattcctattttctttataatggttggtgtagatttaaacataccttcattaattaaagaaccgaaattactaattatcataccgattttaatcgttgcatttatcatttcaaaattaattccagtcatgtttattcgacgttggtttgatatgaaaacaacgattgcatcagcatttttattaacatcaacattatcgctcgtgatagctgcagccaaaatttcagaaagattaaatgctatttcagctgaaacgtcaggtatattaattttaagcgcagtcattacatgtgtattcgttccgattattttcaaaaaactgtttccagttccagatgagtttaaccgtaaaattgaagttagtttaattggtaaaaatcaattaacgattcctatagcgcaaaatttaacatctcagttatatgacgtgacattatattatcgcaaagacttgagtgatcgtcgtcaattgtcggatgatatcactatgatagaaattgctgattatgaacaagatgttttagaacgactaggtctgtttgaccgagacatagttgtttgtgccacgaatgacgatgatattaaccgaaaagttgctaaattagccaaagcacatcaagttgagcgtgtcatttgcagacttgaaagcacaacggacgatacagagttagttgattcaggtattgaaattttcagtagctacttaagtaataaaatcttattaaaaggtttaattgaaacacctaacatgttgaatttattaagtaatgttgaaacgtcactatatgaaattcaaatgttaaattataaatatgaaaatattcaattacgtaatttcccattcggaggagacatcatcttcgtgcgtattatccgtaataatgagtcgattgttccgcatggagatacacaattgcgatatggagatcgcttaattgttaccggtgctaaagaatacgttgatgaattgaagcgagagttagaattttatttttaacaataatgatattaaaatgcaaacgtattttagtacgacgtaaaattaatgattttaaaatgcttgtatgtatatgattttgataaataaatgctttttacgtaaatcaagtttgatacagaaaggactaaatcaaacatttatcgttgtaatacgtttaaataactttattaaaaagtcataatagtgttaaaatgtattgacgaataaaaagttagttaaaactgggattagatattctatccgttaaattaattattataaggagttatcttacatgttaaatcttgaaaacaaaacatatgtcatcatgggaatcgctaataagcgtagtattgcttttggtgtcgctaaagttttagatcaattaggtgctaaattagtatttacttaccgtaaagaacgtagccgtaaagagcttgaaaaattattagaacaattaaatcaaccagaagcgcacttatatcaaattgatgttcaaagcgatgaagaggttattaatggttttgagcaaattggtaaagatgttggcaatatcgatggtgtatatcattcaatcgcatttgctaatatggaagacttacgcggacgtttttctgaaacttcacgtgaaggtttcttgttagctcaagacattagttcttactcactaactatcgttgctcatgaagctaaaaaattaatgccagaaggtggtagcattgttgcaacaacatatttaggtggcgaattcgcagttcaaaactacaatgtgatgggtgttgctaaagcgagcttagaagcaaatgttaaatatttagcattagacttaggtccagataatattcgcgttaatgcaatttcagctggtccaatccgtacattaagtggaaaaggtgtgggtggtttcaatacaatttttaaagaaatcgaagagcgtgcacctttaaaacgtaacgttgatcaagtagaagtaggtaaaacagcggcttacttattaagtgacttatcaagtggcgttacaggtgaaaatattcatgtagatagcggattccacgcaattaaataatatcattcaacagctttgttcacgttattatatatgtgagcaaagctttttttgcttttataataatcggactgatggaaaattatttgatatttcatctgactgatttttttatgcacaaaaaatcgcctcaaaagctgtagtttcaacttttgaggcgatagtatcttatattattaaaagacatccacagaattagtctttaacatcgctgtttgctttatcaataatgcgttggcggtatttgaaaatattactaacaaccgttttaagtacagcatataatggcactgcaatcagaactaatgtaaagccacctaaatctcctgctgctaaaataacaacgataattgttaaaggatgaatacttaaagatttacccattacatttggtgtaatgatattaccttcaagttggtgtgcaattaatgtaatgatacaaacccatataaatgtagtaggactatctataataccgagtattgctgcaggtgcaaatgataaccatgaacctaagaaaggaattaagtttgcgacaccagcaaatagtactaataaaggaatatatggtaagtcaataattgaataaccgatatataagaatacacctaaaataacactgacagttacttgaccttgaatgtaagattttaatgtaaagtttaaatcagttaataaatctacgaaaaatactttacgttcacctttgaaaaatttagcaactgctgggataaatttttcatggtcttttaacatataaattaagaagaatggaaccataatcaataagaagatggttgaaattaatgatgtaatatattgtaatgaattagataaaatattagtaacgccatcacccattgatttaaccatatttgtaattctacttgttacgtcttcaggtaatttatccatttgagctagtgcgaatttaataatttgctctgcttctttttgtaaggcaggtgtttgactaattaaattgttgatatttgaaatgatgattggtgcaacaaacgcaacaattaagccgataatagcaaacaaagctaacatgattgttgttatactagcccatcttggaaaaccgactttttcaagtaagttttgaaaaggtagacagatataaaataaaaaaccactaattaaaaatggaagaaatacagaaccgatgattgtagctattggagtaaatacttcgtgcacttccataaatagtttgatgagaatgaacagcataatcagagcaatgccagttcggaaccaaaccttgtttaacataaacgatgttcctcctatttttctaaacttagttattatttagtatatcctaaatagcagtgcttaaaaaggttaatattttttaaatatacttaaattaaccattcactttctattttaagatatttactttcaatagtttgtgagacttttcaatgactcgtatgtctgcaaatggatcaaacagtgccaatttatatgaataacttattttaatattaaacgtgttaaaaaaagaaatgatcatattatcatttataagaatattctgaaaaatatattgaagtgtctcgtgcttaatcgtataatatttttatgtttaaacaatagggggaatcttatgattgaaaaattagtaacctttttaaatgaggttgtttggagtaagccattagtttatggtttgctaattactggtgtgctatttacattgcgtatgcgattttttcaagttagacattttaaagaaatgattcgattaatgtttcaaggagagaagtctcctaatggtatttcaagttttcaagcgatagccatgtctttagcaggcagggttggtacaggtaatattgtcggtgtatctactgcaatatttataggaggacctggtgcagtattttggatgtggattactgcgtttttaggtgcaagtagtgcttttattgaatctacacttggtcaaatattcaagagagttgaaaataatgaatatcgtggtggaccagcgtattatattgaatatggtattggtggtaaatttggtaaaatttacggaattatctttgctattgttacgattatctcagtaggtctattgcttcctggtgtgcaatctaacgctatagcaagttctatgcacaatgcaattcatgttccacaatggttaatgggtggtattgttgtagttattttgggattaattatttttggtggtgtacgtagtattgccaatgttgcaacagcagttgtaccatttatggcaattatttacatactaatggctgtcattatcatttgtatcaatatacaagaagtgccagcattatttgcattaattttcaaatcagcatttggattacaatctgcttttggtggtatcgttggcgcaatgatagagattggtgttaaacgtggattatactcaaatgaggctggtcaaggtacaggtccacacgcagcagcggcagcagaagtatcacatccaagtaaacaaggtctagtacaagcattttcagtttatattgatacattatttgtatgtactgcaactgctctgattatacttatttctggtacatataatgtgactgatggtacggttaatgcgaatggcacaccgcatttaattaaagacggtgggatttatgttgaaaatgcaacaggtaaagattattcaggtactgcgatgtatgcacaagccggcattgataaagcgttccatggcagtggttatcaatttgatcctactttctctggcgtaggttcgtactttattgcatttgctttattcttctttgcatttactacaattttgtcgtactactatattacagaaacaaatgttgcttatttaacgcgtaatcaaaataatcaagtttcatcggtatttattaatattgctcgtgtgattattttgttcgctacattttacggtgcagttaaaacagctgatgtagcatgggcattcggtgatttaggtgtaggtctaatggcttggttaaatatcattgcgatttggattttacataagcctgccgtaaatgctttaaaagattatgaaattcaaaagaaacgtttgggcagcggttataatgcagtttatcaacctgatccgaataaattacctaatgctgtcttttggttgaagacatatccagaacgtttaaaacaagcacgtgccaaaaagtagtcaacttttagttatggtatatatagtaatcatttgataaaaaagaaaaagtattgagaattttaggtgctcagaaatttgaattttaaaatatagtgtctcttggtacaataataatacaattactagggggcactttttttatgttggaatttaaagctggaaagattaataaacatgttttatatagtgatattttaaatagagatgtcacactaagtatttatttgcctgaatcttataatcaacttgttaaatataatgtcattctttgctttgacggattagattttttacgtttcgggagaatacaacgtacatatgaatcgttaatcaaagaagcgcgtattgatgatgcgatcattgtcggattccattatgaagacgttgataagcgtagagaggaatttcatccacaaggaagtcgttctcatttaactattcaatcagtcggtaaagaaatattgccatttattgactcgacgttttctacactgaaagtaggtaatgcaaggttattagtaggggatagtttagcgggtagtattgccttattaacggcgttgacctatccaacgatttttagtcgtgtagcaatgttaagtccacattcagatgaaaaagtattagataagctaaatcaatgtgctaataaagaacaattgacaatttggcatgtcattggtctagatgaaaaagatttcactttaccaacaaatggtaagcgtgccgatttcttaacaccgaatagagaattagctgaacaaattaagaaatataatataacttattattacgatgaatttgaaggtagtcaccaatggaaagattggaaaccattgctgtcagatatattattgtattttttaagtaaaaacacagatgatcaactttatgaataatttacattagtagatttagtatgaattgtcttcatatagtctggtctataatatatttataaaagattttactgtttaatttaatttaaatttgtctaatttgcaaaagatgtataatgaattatttttaatgtaacggttttcaaagaaatttgatataatagcaataggttaaacaaaggaggaattcagatgattttagggttagcattaattccatcaaagtcatttcaagaagcggtggattcttaccgtaaaagatatgataaacagtattcacgcattaaaccacatgtgacaattaaagcgccatttgaaattgaagatggtgatttagattctgtcattgaacaggttagagctcgtattaatggtataccagcagtagaagttcatgctacaaaagcttctagcttcaaaccaacgaacaatgtgatttactttaaagttgcaaagacggacgacttagaagaattgtttaatcgctttaatggagaagatttctatggagaagctgaacatgtttttgtgccacactttacaatagcacaaggactatctagccaagaattcgaagatatttttggtcaagtagcattagctggggtagaccataaagaaattatcgatgaattaactttgttacgttttgacgatgacgaagataaatggaaagttattgaaacgtttaatttagcttaagtaacataatagtattgttaatcgtagtatgtttgaattaataagaaaatggtcatttttattgaatgcaataaaatgaccattttctttattttaaaaaccgttttaaccttacttagctttttctctatttgctataaagtagcttccataaaatacagctaagactaaaaagattaatgccgagaaataaaatgtattgtttaaattgttggtaaattgtgtaattaatccgccaaataatggcccgatcattgagccgaatccttggatactattaaaaacaccccaagtttcttcttgttcatctgatttgataaatcgtgccataaaggtattccatgctggtaataagatgccatacattagaccgatagctaaagcgataatccacacgatgtgaatattaacaatcatagatagagtgaaaattaatatcatgtataaaataaatccgcttagaatgacaccatacataaagtttctgctacggttatctatcagtttcgataaaaatagcatcgaaactgcacagccgataccaccaataatgattgcaacagtatattcaattgtgcttacgttaataaccttagtagcatatgttggtaatataggaactagggcagcaattgcggcaccttgtaaaagaataccagggaacaacaataaatggcgctttgtcacatcaacaatttgtctcaattgagctttaactggacgagtattataatttgttaactttacatcgacaaaataatataatatccaagcaattaaaacgactaaagacatcatgaaggcgaagcgtgttgggtgcactttgataagtaaattcataaaaaccatacctaccaataggcctaacaaccatgaaaaataaacatagcccatttgcttgccacgcttatcttcttcaacactggataacataatgacccaaataggactaactgcaataccgagcatcatagcactaaatatgattacaaaaggtgatgctggaaaccaaataactaaaaataaacttgtaaatgctaaaataaatccagtcgttaaaacgatttttgtgccgaatttttttagtaaaaatcctataacaaagtttgtagatgcatcagcaataaaatgtattgaaaatgctagagacgttattgctacagcaatggatgtaactgttggcaagaaattaatatagcttaggatatacatgcctctcgcaaattccattaaaaataagataataagcattaaaatgaaatttttatgattagcgtaattatttaacgaagaatcttgcatataaaggaacctttccataaatctcttgtggttgtgatgaatgaccgattaaatcaagtaagtctctacatattgtctgtgtagcatacttaattttatcttgttccattgtactaatcatgttagttaattgctcattaccgttcgttaaacctgctacaatttttattgcttcttctggagtatcagcgattttaccaaaacctttttcttcaaagtaaagggcattttcaagctcttgaccaggtgcaggatttaggaaaatcattggaatacaacgggcgaaaccttcagttattgtgataccaccaggtttcgtaatcataagttgacttgatgccatccattcattcatgtgtttggtataacctagaatcaatacattctcgttagatttaaacttagctgttaaagaacgctttagctctttgctcttaccacaaatcataactacttgtgcatttgcacttttcgctaatatatcagtgatcatcgtgtcaaaacctttagatacaccaaatgcaccagctgacattaaaatagtttgcttatctggatctaagttgttgtctattaaccactgcttttgattaataggtgtttcaaatttgttatcaataggaatacctgtcactttaactgttgaaggatcaatacctacgtctatgaagtcttgtttcgtttcttttgttgccacataatatcttgttgaatacggcgtaatccagtttttatgtaagcgatagtctgtcatcactgtagcaattggaatattaatgttaaattgctcagttagtaccgacataactggtgtaggaaacgttaataatattaaatctggcttttcttttatcaataaattaattaatttattaagtccatagtatttgtagaaacatttgtctagtttatctgggcggctgtaataaaaccctttgtacatatttctaaaatatttaaagctattgatataccattttttacaaatagaagtcaaaattggatgagcttccataaataaatcgtgctcaatgacgcttaaatggtctagattcatatcattaagttgattaacgatactctgtgtaacttgcatatgaccgttaccgaaagagccagtaataatcaatatctttttattttgagtaaccattaatagccaccctccgttagtttgaaaattttatttaagtgtaacttattttacggcattataaaagaaataaagacgcaaagtcgttacatttatagcattttaatcaatagatgaattgatacaaaataaaacgttattttataaagcaatttattgttctacgttttatttgtatatttaaaattatccagtatacaattatagcatatttttggaaacaattatgatattataccatgttacaagatggttttaataatttaagatgagccataattgtgaaactaattcataataccttaagttttatttttaatagtagaaattagaaaatgctgattagtaggacatatcagtgaaattataaatttattaacatcaacaaaacgtgtataataaacatattgtagaaaaaggagcggttcagtttggatgcaagtacgttgtttaagaaagtaaaagtaaagcgtgtattgggttctttagaacaacaaatagatgatatcactactgattcacgtacagcgagagaaggtagcatttttgtcgcttcagttggatatactgtagacagtcataagttctgtcaaagtgtagctgatcaagggtgtaagttggtagtggtcaataaagaacaatcattaccagctaacgtaacacaagtggttgtgccggacacattaagagtagctagtattctagcacacacattatttgattatccgagtcatcagttagtgacatttggtgtaacgggtacaaatggtaaaacttctattgcaacgatgattcatttaattcaaagaaagttacaaaaaaatagtgcatatttaggaactaatggtttccaaattaatgaaacaaagacaaaaggtgcaaatacgacaccagaaacagtttcattaactaagaaaattaaagaagcagttgatgcaggcgctgaatccatgacattagaagtatcgagccatggcttagtattaggacgactgcgaggcgttgaatttgacgttgcaatattttcaaatttaacacaagaccatttagattttcatggcacaatggaagcatacggacacgcgaagtctttattgtttagtcaattaggtgaagatttgtcgaaagaaaagtatgtcgtgttaaataatgacgattcattttctgagtatttaagaacagtgacgccttatgaagtatttagttatggaattgatgaggaagcccaatttatggctaaaaatattcaagaatctttacaaggtgtcagctttgattttgtaacgccttttggaacttacccagtaaaatcgccttatgttggtaagtttaatatttctaatattatggcggtaatgattgcggtgtggagtaaaggtacatctttagaaatgattattaaagcagttgaaaatttagaacctgttgaagggcgattagaagttttagatccttcattacctattgatttaattatcgattatgcacatacagctgatggtatgaacaaattaatcgatgcagtacagccttttgtaaagcaaaagttgatatttttagttggtatggcaggcgaacgtgatttaactaaaacccctgaaatggggcgagttgcatgtcgtgcagattatgtcattttcacacctgataatccggcaaatgatgacccgaaaatgttaacagcagaattagccaaaggtgcaacacatcaaaactatattgaatttgatgatcgtgcagaagggataaaacatgcaattgacatagctgagcctggggatactgtcgttttagcatcaaaaggaagagaaccatatcaaatcatgccagggcatattaaggtgccacatcgagatgatttaattggccttgaagcagcttacaaaaagttcggtggtggccctgttggtcaataaaagacttattgatgaaggtaaaactattgatgtttatttattcgaagcattaaatgaccagataattattgctataccagattggttttggtcatatcagatggcaatgacattaaatgaagaaacttgttttgaagcaatactcatgcaattgtttgtttttaaagaagaggaagaggcagaatcgattgcatcacaactaacagattggatagaaacatataaaaaggagaaagactaatgaacttaaagcaagaagttgagtctagaaagacttttgcgattatttcacatcccgatgcagggaaaacaacgttaactgaaaaactattgtacttcagtggtgctattcgtgaagcgggtacagttaaagggaagaagactggtaaatttgcgacaagtgactggatgaaagttgaacaagagcgtggtatttctgtaacaagttcagtaatgcaatttgattacgatgattataaaatcaatatcttagatacaccaggacatgaagacttttcagaagatacgtatagaacattaatggcagttgacagtgctgtcatggtcatagactgtgcaaaaggtattgagccacaaacattgaagttatttaaagtttgtaaaatgcgtggaattccaatctttacattcattaataaattagaccgagtaggtaaagaaccatttgaattattagatgaaatcgaagagacattaaatattgaaacataccctatgaattggccaattggtatgggacaaagtttctttggcatcattgatagaaagtctaaaacaattgaaccatttagagatgaagaaaatatattacatttgaatgatgattttgagttggaagaagatcatgcaattacaaatgatagtgcttttgaacaagcgattgaagaattaatgttggttgaagaagcgggtgaagcctttgataatgacgcgctgttgagtggagacttaacacctgtatttttcggttcagctttagctaactttggtgtacaaaatttcttaaatgcatatgttgattttgcgccaatgccaaatgcgagacaaacaaaagaagaggttgaagtaagcccgtttgatgattcattttcaggatttatctttaaaattcaagccaacatggaccctaaacaccgtgatagaattgcctttatgcgtatcgttagtggtgcatttgaacgtggtatggatgttactttgcaacgtactaataaaaagcaaaaaatcacacgttcaacgtcttttatggcagacgataaagaaactgtgaatcatgctgtagcaggcgatatcattggactatacgatactggtaattatcaaattggagatactttagttggtggaaaacaaacctacagtttccaagatttaccacaatttacgccagaaatttttatgaaagtttctgctaaaaacgtcatgaaacagaagcatttccataaaggtattgaacaattagtacaagaaggtgcgattcaatactataaaacattacacacaaaccaaattattttgggtgctgttggtcagttacaatttgaagttttcgaacatagaatgaaaaacgaatataatgttgatgttgttatggagccagtaggccgtaaaattgcacgttggattgaaaatgaagaccaaattacagataagatgaacacatcaagatcgattttagtgaaagatagatatgacgatttagtattcttatttgaaaatgaatttgcaacaagatggtttgaagagaaattccctgaaattaaattgtatagtttactttaatggctcaattgtataatcgaatttgttactttaaaaataattgtttcgttgaagaaaaataaattgtatattttaaaagaaaaaggtatactatgatgtatcaaatgaataacctatggcattctgtcagaggggagtaacttaagaatcatgaccgtataaatgattcgacactttatcgtcattacgaagatatcttccggtaaagtgggcaattaaaattgcttagtgagacctttgctatttatttagcataggtctttttgtttgtacttaacttatttatttaaaggagttgtacatgttaatggatccaagtttgatcttaccttatttatgggtacttgtcgttttagtatttttagaaggcttattagcagcagataacgcgattgttatggctgtaatggttaagcacttaccacccgaacaacgtaaaaaagctttgttttacggtttgctaggtgcatttgtatttagatttttagctttattcttaattagtattatcgcgaacttttggtttattcaagctgcaggagcggtttacttaatttatatgtcaatcaaaaatctgtggcagttctttaaacacccagaaattgaaagtcctgaagctggagatgatcatcattatgatgagtctggtgaagagattaaagcaagtaacaaatcattctggggaactgtgttgaaaatagaatttgcagatatcgcatttgccattgattctatgcttgctgctttagctattgctgtaacacttcctaaagttggtattcactttggtggtatggacttaggtcagttcgtagtcatgttcctaggtggaatgattggtgttattctaatgcgttatgcagcaacatggttcgtagagctattaaacaaatatccaggacttgaaggtgcagccttcgcgatcgttggttgggtaggtgttaaattagttgtcatggtattagctcacccagacatcgctgtattgcctgagcacttcccacatggcgtattatggcaatctattttctggacagtactaattggattagtaattatcggttggttaggttcagttgttaaaaataaaaaatcgcataaataattgatgtgaagcggacaatcttaatttagtttaaggttgtcctttttcatttaattgagtgatttatgaaaaatggattttgaagaatgtgaatcaaaagatgcgatatagtataaagaaaatgtgccttttatatttagcattttttcaatagaaattatatagattttaaagcaaattaggtgttaatgtgtcataatgataagtgattttattgaatggagtggacattagtggatattggtaaaaaacatgtaattcctaaaagtcagtaccgacgtaaacgtcgtgaattcttccacaacgaagacagagaagaaaatttaaatcaacatcaagataaacaaaatatagataatacaacatcaaaaaaagcagataagcaaatacataaagattcaattgataagcacgaacgatttaaaaatagtttatcatcgcatttagaacagagaaaccgtgatgttaatgagaataaagctgaagaaagtaaaagtaatcagggtagtaagtcaacatataatagagatcattatttaacagacgatgtatctaaaaaacaaaattcattagattcagtggaccaagatacagagaaatcaaaatattatgagcaaaattctgaagcgactttatcaactaaatcaaccgataaagtagaatcaactgacatgagaaagctaagttcagataaaaacaaagttggtcatgaagagcaacatgtactttccaaaccttcagaacatgataaagagactagaattgattttgagtcttcaagaactgattcagacagctcgatgcagacagagaaaataaaaaaagacagttcagatggaaataaaagtagtaatctgaaatctgaagtaatatcagacaaatcaaattcagtaccaatattgtcggaatctgatgatgaagtaaataatcagaagccattaactttgccggaagaacagaaattgaaaagacagcaaagtcaaaatgagcaaacaaaaacctatacatatggtgatagcgaacaaaatgacaagtctaatcatgaaaatgatttaagtcatcatacaccatcgataagtgatgataaagataacgttatgagagaagatcatattgttgacgataatcctgataatgatatcaatacaccatcattatcaaaaacagatgacgatcgaaaacttgatgaaaaaaatcatgttgaagataaacataaacaaaatgcagactcgtctgaaacggtgggatatcaaagtcagtcaagtgcatctcatcgtagcactgaaaaaagaaatattgctactaatgacaatgataaattaaatggtcaaaaaccaaatacaaagacatcggcaaataataatcaaaaaaaagctacatcaaaattgaacaaagggcgcgctacaaataataattatagtgacattttgaaaaagttttggatgatgtattggcctaaattagttattctaatgggtattattattctaattgttattttgaatgccatttttaataatgtgaacaaaaatgatcgcatgaatgataataatgatacagatgctcaaaaatatacgacaacgatgaaaaatgccaataatacagttaaatcggtcgttacagttgaaaatgaaacatcaaaagattcatcattacctaaagataaagcatctcaagacgaagtaggatcaggtgttgtatataaaaaatctggagatacgttatacattgttacgaatgcacacgttgtcggtgataaagaaaatcaaaaaataactttctcgaataataaaagtgttgttgggaaagtgcttggaaaagataaatggtcagatttagctgttgttaaagcgacttcttcagacagttcagtgaaagagatagctattggagattcaaataatttagtgttaggagagccaatattagtcgtaggtaatccacttggtgtagactttaaaggcactgtgacagaaggtattatttcaggtctgaacagaaatgttcctattgatttcgataaagataataaatatgatatgttgatgaaagctttccaaattgatgcatcagtaaatccaggtaactcgggtggtgctgtcgtcaatagagaaggaaaattaattggtgtagttgtagctaaaattagtatgccaaacgttgaaaatatgtcatttgcaatacctgttaatgaagtacaaaagattgtaaaagatttagaaacaaaaggtaaaattgactatccggatgtaggtgttaaaatgaagaatattgccaatctaaatagttttgaaagacaagcagttaaattgccaggaaaagttaagaatggtgttgttgtagatcaagttgacaacaatggtttagcagatcgatctggtctgaaaaaaggtgatgtaattactgaattagatggcaaacttttagaagatgatttacgctttaggcagattatatttagtcataaagatgacttgaaatcaattacagcgaagatttatagagatggtaaagagaaagaaattaatattaaactaaaataatgttgaggtgaacaacgtgtcaatttttagccagtttttaaaaagatcaagccctcaacaaggtattgtattgtactatatcgtcgtaattgtcgttgcatttttattattaaacttaccgtatgttcataaaccaggtgtagaagtaaatccaattgacacattgtttgttgccgtatccggaattagtgttactggattgtctccgataagtattgtcgatacctattctacatttggacaattaattatcctcgtgatattaaatattggtggaattggcgtcatggcaattggtacgatgttatgggtggtactaggtaaacatattggaattagagaacgtcagttaattatgttagataataacaaaaacacaatgagtggtaccgtcaaattgattattgatattgtaaaatcaatatttgtaatcgaactcgtaggagccatgttattagcattttacttttatcgagataatccagatttaaaatatgcaatcatgcaaggtgtttttgtttctatttctgccactaccaatggtggattagatattacaggtaagtcattaattccttatgcacatgattattttgtacaagcgatagttatatttttaataattttaggatcaatcggcttcccagtgttattagaagttaaagcttatattcaaaatagggttactaattttagattttcattatttactaaaattacgacatcaacatatttattcctatttattgttggggtattagccattctattatttgaacataaccatgcgttcaaaggattaagttggcatcaatcgttattctattcgctgtttcaatcagcgactacaagaagtgcgggtcttcaaacaattgatgtgacaacactaagtgaccctacgaatattatcatgggtattttaatgtttataggttcttcgccaagttcggttggtggcggtattcgtacaacaactttcgctattttaattttgtttttaattaactttagtaataatgccgataaaacatccattaaagtttacaatagagaagtacacattatggatattcaacgttcatttgcagtatttacaatggcgacaattttaacatttttaggaatgctaattatatcagctactgaaaatggtaagcttacatttttacaagtattttttgaagtcatgtctgcatttggaacttgtggactatcgcttggtgtcacaagtgatattagtgatatttccaaggtcgtactaatggtactcatgtttataggacgtgttggcttaatatcatttatcattatgatagcaggacgtcgagaaccagataaattccattatccaaaagaacgtattcaaataggataatataatagcaatctaagtttagttaatgtagattttaactggaacttagattgcttttttagtttgtatttttaacttattttataagacgattggttttgaaaatggtaaactagtaacaatgagaggtgtaacatgatggaaaaaaatgaaaacattaatgtagagattttaactacgtcagatatgcatagtcatttcttaaatggtgattatggttcaaatatttatagagctggtacttatgttaaccaagtaagagcacaaaatcatcgcgtcattttattagatagtggcggaagtttagctggctcgttagcggcctattattatgctattgttgcaccttataaacgacatccaatgataaagttgatgaacagaatgcattatgatgctagcggtgtgagtccaagtgaattcaagtttggtttatcatttttaactcgttcaattgcattggcacgttttccatggttatcagcaaatattgaatacaatgttactaaggagccttatttttcaactccatattgtattaaacattttggtgacttaaaaattgctatcgtaggcgtcacagcagatggtttaatggaaaatgagtattctgaaatggagcaagatgtatctattgaaaagacattagtggcatcaaaacgttggattagatatatccatgaagttgaagagccggattttttgattgtaatttatcatggtggattgaataaaattagtaatagtacgaaaaataaaaaggcaagttcgaatgaagctgaaaaattaatggaagaactcggtgttatagatttaatgattacagcacatcagcatcaaacaatagtaggtcaagatcatgaaacgtattatgttcaggctggtcaagatgcaaaagagcttgtacatctctcgattaattttaaaaagagaacaacaacttatgatgttgaaagcattgattctaaagtgattgacttaaatgagtatgaagaggatcaagaattattagatttaacattctatgatagaaaggcagtggcttattggtcacaggaaatcataagtgataaaggtttgatgttatcagtaaatgggttacaagatttagtctgtcaaacacatccattttcgcaattattacatgatgcaattcaccttgcatttgataatgatataacatgtgttcacgtgcctatgaacggagagaagggattgagtggacagattcgaaacgaagatttgtatcatgcatacccatatccagataagccaatggatatgacaattagtggtcaaaatatcaaagatatattggagtatagttattcatatttagattttgttaatgagcaattaagcttaacaattattgatgaaacgttatgtacaatgtggcaaggattcaattatgagattgatatgaatcaagaacctgggcaacgagtaatgttagatcaaattgatttgactaagagttatagagttacaatgactgactattgttatcgtaactacaagaattatttaaaaaatgctattatacatgaatcatacgatgaaacaatgagtacattaattgcagagaagttaagaaatccgaattatcgtatttcatgtagtgataattttgtagttaaaaacaggtaaatattgctatgtaataaattaattataagtttaacaagtataaaaacctttcttagaaaagattatctaggaaaggtttttagaattttaaaattgatataaaagaacagtgaaattctcattcattatatataagtaaacaaaaaagcttaaatggtatataccatttaagcaagtaacggaaacggagggattcgaaccctcgcgccgctttcgcgacctacacccttagcaggggcgcctcttcagccaacttgagtacgtttccaatggctccacaggtaggactcgaacctacgaccgatcggttaacagccgatagctctaccactgagctactgtggattaatttgtatgtgtttgaatatcaagcacaaatattattataacaagattaagttaatttgcaatagataccttaaaaaaatatgcagaacatttacactatatttataaaacattccgcatattttaaaaataaacaatttatttatcttcaaataaagaatagcgtgtcaatgcttcaaacacattcaatgtggctttattataatctattggttggtcgggattttttgatatcatgcgagattgtttatctaccatgtaatagtaaaaaatggaattgttatattgatgccataaactgtggtatgaaacatgaagaatgattgattcattattaataaatgtcactttacatttacgattttttaattctttaatactttcgatataatgcatatttaaccaaatattttcattttgtctgtcagaatgtgttgggaaaaaataagttggaaataatggtgttagtaaaataggtggtttactagaaatgccagtaatgcggtttgtctctgctttcttgccaagataagtattaccataaaatttgcaagagcgttcaatgattttctggactttaaaaggattttgaatacgcgttttgtcaaaccgaattatttcactaccgtttctttgatcgtcatcatcaaatgctggtcgaataaccatgtctcctttgcgtatcacataaatattttgagaatacataagcaaaacctcgctttattaagttttaaaccattaatataaaaatgcaattaatgatataaagatattttataataaaattctgagttgtcaagttattattttggtgaaaatgtacaataatttttaactaatagtcagaatattcattgatttcaaaattagaaaaatgtatacttattataaattaaagaaaggtagtggtttctatgaaatacaatactaatgttaaacatacaactttagaagcgtttgtcacaaccgtcaatgatttgggtattgaattaattatcaatgaagcacttcgagaggtaagaaaacgacagctcatagaacttatagatgacgcactcgtcaataaagatgaagcagcatttaatcaatatacggcagaatacaaaaatttggaggcatttctcggtgaataacattgattcgaattccataacgcaattataaaaggactattcttaacatctcatacatgtaagaatagtcctttaaacgtttatgacattaatctaattaattcatgtctatctatatcaccgaaatagtgatataaatcatattctgatagtgcttcttctatgtgctcaaagtcgtgtagacagccaactaatgcattttcaagatcagtgacatctccgacaccaaagaaatcaccgaaaatttttgcatgttcgattttacctcgtttaacatcaaacttaatttgtacaaatcccttttcaaatttttcctcgcgttcaaagttatatttagggtttctcccataattccattcccaagttctatatttgtcgttacttaacttttcaatattttcccaatcttcatccgttaatttatattcttctacttcagtttctccaaagatagttttcaagatgatttttttaaattcttcaatttctaaagggccatttaaaaattcttgaatgtttgctactcgtttacgaacagatttaataccttttgatttaatcttagctggattaacttttagtgcattctgaacttcgtctaaatcactatttaacatcaacgtaccatgactaaacattctatttttaactttaaccatggcattccctgagattttcgcttgtccaacttgaatatcgttacgaccagttaattcagcatttacgcctaaagattgtaatgcttgaacaattggttcagtgaatttttggaaattgtggaaactgttaccatcatcgtctgttataaaactaaagtttaaattgccagtatcatgataaacagcgccaccaccagaaattcttctaactacatcgatgttatgagcatctatatatgtctgatttacttcctctatcgtattttgattctttccaacaatgatagatggtctatttatgtaaaataaaaagtaactttcttctgctggtaaattttttaaaacatattcttccattgctaagtttaaagttggatctgtaatattattattactaatgaatttcattacaatctctcccttatatctatatatattctctacttatttatgccttaactttgctcaaaatgccaattatatactcacaaatcattctaaatatcggcttaaagttacattttattatttttgattgttaatagtttatttgttaagtgaattttagtacaatataatttagttatgatttaaggaggacttaaaatgactgttgcagaagtgggtaacattgttgagtttatggatggattaagaggtcgtgttgaaaaaatcaacgataactctgttattgttgacttaacaattatggaaaattttaatgaccttgatttaccggaaaaaactgttatcaatcataaacgatataagattgttgaataagaaggtaagttataatgaataaaatctcgaaggctttaacttggtttattataagtttcattatatttcatctcatattatttattatgtggggcgaacaccaagaatactggtatttatatacaggtataatgctaattgctggtatcagttatgtattttatcaaagagatattgaatctaagcggttgcttacatcaattggtgttggtattattacggcaattattttaattatacttcaacttttattctcacttataacttctaatttaagttatagttcattaattaaagaattagcaagaacaggtgtcaattggaagtggcaaatgttagtaactttactttttgtcattccatgtcacgagttatatatgagaactgttttacaaaaagaattaacacatttttcaataccgaaatgggtagctatattaataactgcaatttgttctagttcattatttatttatttagataattggtggatagtaacatttatatttgttgcacaagtgatattatcattaagttatgagtatactcgacgcatagcaacaacatccgttgcgcaaattgttgctattatattgttattaatttttaatgcttaaataagcttttcttagacgtctgtgttctaagaaaagctttttgctttagaaaagcaatacgaagattcaaggcatgctttattatagtgtatacatttttaacggcaagcggttattattgagattaggttttagtcagtttttattactaaatattttataaaaatggcataatatttttcgagcaagttgaattgatggtggctatctgagtaaagggggtggtgcctatggcattacttaacacttttggaaggaaaagcctattgtgatatctattgcaaacgcattacatttaatgttaagtttcggtatgtttatcgtcactttcattggtatagtagtagcaataataaatttaagcaataaaaaataaccatcatttcaaaactttgacatagaatgatggttaaagcaaatctcatttagtcaccgtctttttaacgggctcattaggcgacatgttcctgcatgtcgtctttttacatttttatagtaacatatcttttatttaattgtctatttttattagatgtgtaacaaaattttgaagtattttcggtatattgcctgctaaacatgtcagatttgaaaggaaaatcatactgtggtagaaatcacttatgattctatggcagtacatatacataagtgatttctattgaatatgtaatgaagttcatatattaataaaactttcattggtatagtagtcgcaataattaatttaaacaatataaaacaaccatcttttcaaaactttgacaacgaatgatggttaaagcaaatctcatttagtcaccgtctttttaacgggttcaataggcgacatgttcctgcatatcgtctatttatgcactgcgcaatttaataataatacaattatactttgatgtccatttaacataaagtagttgaaatttgcagcaaataaattaatcttgactattttcagaaaattctgtataaataacgaaaaagagatatggattaaatatgaagaggtgtttttatagaagaacaaaatttttggcgctatattatatttatctttagcacttggagtcacggtgtcggcagtaagtatgtttggtcgcattgttatcatgatcataaaggtcatggtgcaacagctatcggaaaatatagatcatttagtggttatacaagagctggtgtaaaagcaaaagcatcagctactaaacataattggtgggtcaatagagcgtattataacatttattaaatactaaaaatcatagaaaataaacaacgcaagaggtacaacatgaaatggttcaaattaatacttgatgttacaatcttcattctaattgctatattgttatttgtttatacatataaagaaaacgaagaaatattgcctgatactaaataccctatagcggtaactgactggaataaaaaatataataaaaatgagatttataaacatataaatcaattcgctaaaaatgagaacgtagcaatctataaatcaacttcaaattatacaaacaaaaacgtagataaagatatatatgtatttaataaatcaaaagcaacaactatcactccttttaatgctaaatataacattcattatttaagtgacgacgaattattaaaaaaagatatcaaagggagttattttgtaaaagacaaaaattttgacgtgtctaaattcataaattttttaaaagaatatggtgttactgctgaatcattcaaaatagatcatatgatgattgccgttggtgtcattaaacaaatgaatatagtagtgccattatccgcacttttaatcgtttattttatttattatattttcgaaaagaacattaatttcaaagcgtatgcgattaagtatttaaatggttttacattaagaaaaataatttttgaaaatttttcaaagaaatgcacgtattgggtaacgttaatcataactcaaattcttttaactacaagtgtactttggatattaaattacacgggtaatttagatttattcatattaagattagttctactttcatgtctttttattttaacgattagtgttattaatttatggactttcttaatgttactaaatttaaatattgccaatatgattaaaggtaagcagcactttaaaacgattcgttttattaatacagtttgtaaaagtattctcttagtactaatagctagtgtaatgatagaaaatactagtgttattaaagatttgaataaaataaaggaaactgagaaatattggaatgtattagatgattattacacgattgaatttgcaccttatcacgaaacaaaacaaagtttgattgataatatgctgcgatcagaacaattagtaaagactagtgaagcagaaaataatacgattttattcaaaccaaagggtgactccgttgacaatgacaacttttcgcctgatgaggggaatgtaatattagtaaataatcagttctggtcgatttatcacaagcagtttcaacctgatattccgataaaaaatcaaaaaaataatgtcgaagtaattattccacaaaagtttcatgcaatgcgtaatgaaatcaatcaagcatatcattcatggtttgaatttgtacaaaataaaaataataaagagaataagttatctatacagtttatcaacaaaaatgattatcgaatttttacatttgatgcacgagatagtcgtcatttgtcatttatagaggcgccaatcattgtgaatgttcaggcatcagatttatcgaatgatttttattatgccatgatcagtcaaggcggctatttattcaaaaattatgacgcgctagtaaaaaatattgaaaagtatcatcttgatggggaaatcagtggaataaccaattataaagatagcgtgatggaaatatatcatgaaaacaatttgaaattaactgtactcaacttttcacaaatcattatcgtaatcatcttagtaattattattttatttgatgtgaaatattattttgaacagcatcgaaaattactcgtaatcaaaaagctatatggttattcaacattaagagccaattaccaatacttattaataaataatatagttgttgtttttattggaatattgacgaatgtaattttacattatcactatataatgatgatatttgcaacgattattgtcgttcaaatattattgcagatttgcagcctatactatcatggccgacgttttaatgaagttatcaaggagttttaactatgaaatatatcattgcaatattattaggattaatcgtatctattactattgcttttacaatcatacatcatcctatacttgatcgttttaatcctttcttaaaaacggaatatagttatgccaaagtcccaaaaggtacgcaacaatatgtgaatattacggcttacagtgaaagaggggaaaagcttgattataaattaacatttaatggattttctcctagtagaacgtatgtcgaaataaagcataaagggcaatatgttatatcgatcacatatgttgaaaaagatgatacaccaaaagaggtaagacaagaatgatagaattaaaagatttaaccatacaaaaaggtaatacacatattttgaagaaacttaatttgaaatttcaatgtggaaaatcatatgcacttataggtaaaagtggatgcggtaaatctatactattaaatactattgctggacttgaaaaaatggggaaacaacatgtctattttaatggtcaattagaacgatttaaatctaatttttacagagataaattagggtatttatttcaaaattatggattaatcgataatctcacagtaaatgaaaatttagatattggattagcatataaaaaaataagtaagaaagaaaaagaacaattaaagatacgttatatagaacagtttggtctgtcaaacagtttaaaaagaaaagttcatactctaagtggaggtgaacaacaacgtgtcgctttaattagaatgatgttaaaagatccgattgttatgttagctgatgaaccaacgggtgcgttagatcctaaaacaggacagatgattattcaatcattatttgatttggtcaatgaaaataaagtgctaattttagcaacacatgatatggctattgcaaatcaatgtgacgaaataatagatttagaacagtatagaaaagtagcatctatgtgatatccaaaagataaaattaaaagccaatcaattgggaatgttaatttcaacactccatttgattggcttttataatgcgttgctatgttatgaaagtaataacggcaaactgaaaaaaagcaatataataatatttaatacgagtagtaataaatgtaattgattttttgttttaatgtagcaaaaaacaatgactaaagatagcagcaatatcatgattgcacctgggaagaaccataatgctgaagctgcataccaaatcattggtaacgccataataatgaaagatataagacaagaaaggataccaataatattataagttctagtcaaaattacacctccaattttcattttaaaatgacatgcgtaaaacaatcattttaaatacatcatacaataaaattaaattgtatgatagatgaatttgaaattaaattgaattggcttgattaaaaggtgattttatggaagataataaaaatggttatttaatagaaaaccatgatacaaaaaaagagaggatagtcctctcaaataatagttaataaaattgtagccatttcttccagctgtaactactaatacaagctaagttcattacgatatgtatgatttcaaattcataaccacttacatatcctcttgtaagtttaagtgtgaagattgagcctaacataacacaaatataaaaaacattaacataaggcgttaaaaagccgataataagtgctaaacctccaacaacttcaccaattgacatcaatactgcaatggtaggtggtaaacctaaagagcctaagaagtgaattgttccatctaaatcaacaaatttcaaagtaccgtgcactaagaatgatgttgctaacatccatctaattaaaagcatacctaatttcatcatgtcacctccaacatacatatttttcttaaaacatagtccaaattatatttgtaaagatgtggaaagtaaagattatttataaaaataattattaaatatttattaaatgttctattgtattgaacaattgttgtagaaagacgtttaagtcatcagttacattttgtatttataaataaagattagcacagcatagtacaaagtttataggtaaatgaattaattatggcatcaaaatatacgtatcttgaacactgttgtggaggcttagtagtagtgagaacaaacagaatgctactttaagcgatatgattaatattaaccagtgcgtcatcttcaaaattagaggccatttgctgtttataatacgaagatttgataatcaaatatgataagaaaaaataatgaccgttttaatatattataagtttattaaattataaaataataatgtagttctctataaaagttgttttggaggtaaatgcgtgaataggaatatcattaaactaattatgtttatgctaattttagttgtagcagtagcgggttgtggtcaaaaagatactgaagagaaaactgaaatgacgacaataaaagatgaattaggaactgaaaaaattaagaaaaatcctaaacgtgttgttgtattagaatatagttttgctgattatttagcagcattagatatgaaacctgttggtattgcagatgatggaagcagtaaaaatataacaaagtcagtaagagataagattggggagtatgaatcggttgggtctagaccacaaccgaatatggaagtgataagtaaattaaaaccggatttgattattgcagatgtcagcagacataagaaaatcaaatcagaattgagcaaaattgcgccgacaattatgttagtcagtggtacgggagattacaatgcaaatattgaagcatttaaaacagtctctaaagcagttggcaaagagaaagaaggcgaaaagcgtctggaaaagcatgataaaatattagcggagattagaaagaaaattgaacagagtacgttaaaatctgcatttgcatttggtatctcaagagcaggtatgtttattaataatgaagatacatttatgggacaattcttaattaaaatgggtattcaacctgaagtcacaaaagacaaaactgtgcatgttggtgaacgcaagggtggcccttatatttatttaaataatgaagagcttgccaatatcaatccaaaagttatgattttagctacgaatggaaaaacagataaaaatagaacgaaattcattgatcctgcagtttggaaatcattaaaagctgtgaaagataataaagtttatgacgttgaccgaaataagtggttgcaatcaagaggtattatcgcaagtgaaagtatggcagaagatttagaaaaaattgcagaaaaagcaaaataaaaatacagcgccactcgtaaatcatataagagtggcgctgtattttttatttatgtttattatctgtcggatgtgatgatttacctgaaagtttatttcgaataaatttaattacataaccgacaaggattgttttaacaattcttttaatgaattgacgcatcgttacatacctcatttctctttatcttatgaactatatacccattcatatatgctttttaaacgtcattgtcacaatttaatttttagggaatataatataaccgtctttatctgcttttttagtaaaaatgataaaaatggcatgtattattgagatgatggtagggatacctgtccagaaaaataataagtgaaaaagaccttgaccaaatttgtcagcataaaatttatgaatccctagacctccaagaaataatgcaactataacataaatggctttattgactttcatttgtaaatcctccttaactataattctacttaaattcgttgtgaaaaccaatctttctaactttagaattttcaaactttctaaaattataagtatatctttttaaaataagctagaatttctatataataaatgttaataacgtaaaagggaatgatgacatagtgatacgtcaagcacgtccagaggaccgatttgatattgcgaagttagtttatatggtttgggatgatatggaattagaattggtaaagcatctacctaaagacatggtattagatgcaattgaaaaaagctgtgttgatgcaacatatagaactttttatcagcatgttttagtttatgaaatagaaaataaagtagcaggttgtattattagctatagcggtgaaaatgaattgaaatatgaaaaagcatgggaactacttgacttgccagaagaaataaaacaatatggcacgccattacctttaaaagaagctaaagacgatgagtattatatagaaacaattgcgacatttgaagcatatagaggtagaggcatcgcgacaaagttattaacgtcattacttgaatcaaatacacatgttaaatggagtttgaattgcgatattaataatgaagcagcattaaagttatataaaaaagtaggctttatatctgatggacagattgaattatacaagcacatgtatcatcatttaattgttaaataaaaaaactcgacagttcgatgtaagtcgattgccgagtagtatcattttatattaaatgcctgcaaataatgcgctaatataaatacctaatgcatataataaaccgaaaaatgtatttgttttaccagcagcagccattgctggcatcattgtaggcggtgtatcattcttcttgaaacgtctgataactttaacaggcattgggaatgataacaacgcaagtaagtaaaataatgagccaccaggtttaataatgatcgtaagtacaataaaggcataagcgataaagtacatgattgccataaatgttaaagaagcatttttacctaatagaatgggtaaagttttacgaccacttactttatctttgacacggtcgcgaatattgttagccatattaattaaaccgatagtgattactataggtacacttaaccaaattacatagctttgaatattgccagtttgaataaagaatgcaataacgataataaacatacccataaatacgcctgagaataattcaccgaaaggcgtccatgaaatagggaaagggccacctgtatataggtaaccaacagccatacatactaatccaactggtaataaccaaaatgaagagttagcagctaaaaacaaacctaatattgctgctacgatgtaaaatgcaatggctaatcgtagcacaagctctgggctcataccgttgcgtacaatggcaccaccaatgcctacagattcatgatcatcaaggccttttttataatcatagtattcgttaaacatattagttgctgcttgaattagtaagcatgctagtaacatggcaatgaataggctgattttaatatgatcttcgctaccaagaaaatatattttagatgctgctgtaccaactaaaacgggtactacggaagcagttaatgtatgaggacgcattaaatgccaatatttcttaactgtagaatattgctgatattgattactcattgaatacaaaacctctttaaatcatattttttataacaaagatattttaatagaaagtagcataaaggtcaattgacgtgaaaaattgcaagataagtttaagcaattcttgtaacacaattatccaaaaatgatacaatataataatgagtgaaaaaagacgaagaaagaagtgaaatggatggctacgggcgtattagaggacgatattgtcaaagagatatatgacagctcaaaggaatgggtttcagttgaagtgaaattatcacagtcactagacccgagcacattatttcatctcactgacaatgaggcaggagatcgcttttatatgcgtttgaatgataatcgaacgtcatattttggctacaaagcaattcaattattcaaaaataattctaaaaataaacaatctatttttaaagactgggaaaaattaaaacataacatcacatttatacatccgcaatctgagaaacatcatcttcgagttgttggagggttccaattttcaagtcataaatcagatgatgaatggcgagagtttggactaaatcattttgtattacctgaagttttaatttcaactgataataatgggacatttttaacttatacagttaaaagggaaagttttactgttgaggcattgaacgatttaatggatttgttcaacaatatatcggatatagatgcggacgagcaaattggggtaattactagaaatgaagatatttataaagatgactggcgtcaacttgtagtagaagcaatagaatctattaataatgaagaaaaaattgtactagcacgtagacggttaataaagttcgataaagatatcagtattccatatattctaaagcaagcatattctaaagaaaaaaacagttatatattcttgttagaatcacaagattctatattcttttcacaaacacctgaacaattaataaaggtcaataataaaatactatcgactaaagctgtagcaggtacaattaaacgttcacaagatgaagacgaagatacaaaaaatgttgaagcatttttaaaagataataaaaacttaaccgaacatcgatttgttgttgacagtattttacatgatattaaaccttatatcactgaattacattatgataagacgcctaaaattctaaaaaatgatcatttatatcacttgtacactgaaataaaggcgccactgaaggatgattcgtatattagtttaattgatcatttacatccaacacctgctttaggtggctatccaaaagaatttgcaatggattttattgagcagaaagaatttggtacgcgaggattatatggtgcaccggttggctatatagatatatacgatgattgtgaatttattgttgcaattcgttcgatgcttattaagaaagcacaagcaacattatttgcagggtgtggcattgttaaagattctgatccagatagtgaattggcagaaacgaaccttaagttcacaccaatgatgaatgcattaggagtcgatatgaatgggaaatcataaagcagctttaacgaagcaagtttttacatttgcatctgagttatatgcgtacggcgtaagggaagtagttataagtccaggatcacgctcaacgccacttgcacttgcatttgaagcacattcaaaaattaaaacatggatacaccccgatgagcgaagtgcagcgttttttgcagttgggttaattaaaggcagtgaaagacctgtcgctatattatgtacgtctggtacagcagcagcgaattatacgcctgcaattgctgaaagccaaattagtagaattccattaatcgttttaacaagtgaccgtccgcatgaattaagaagtgtaggcgcaccacaagcgattaatcaagtaaatatgtttaataattatgtaagttatgagttcgatatgcctattgcggatgatagtaaagagactattgatgcaatttattatcaaatgcaaattgctagtcaatatttatatggaccacataaagggccgattcattttaacttgccatttagagatccgttaacacctgatttgaatgcaatagaattgttaacttctgagatgaagattttaccgcactatcaaaaaagtatagatgcatcggcattaagactcattttaaataagaaaaaaggtttaattattgtaggggatatgcagcaccaagaagttgatcaaatactgacgtattcaacgatatatgatttgcctattttagctgatcctttaagtcatttaagaaaatttgatcatccgaatgtgattagtacgtatgatttgttatttagaagcggcttagacttaacggttgattttattatccgtgttgggaaaccagtgatttctaaaaagttgaatcaatggttaaagaaaactgatgcatttcaaatattagtgcaaaacaatgataagattgatgtctttccaatagcaccagatatttcatatgagatttctgcgaatgatttctttaggtcattaatggaagacacgacagttaatcgcgtaagttggttagaaaaatggcaacgcttagagaaaaaagggcgtaaagaaattaaatgttatttggaacaagctacagatgagagtgcattcgttggtgaattgattaagaaaacatctgaaaaagatgcattatttattagtaatagtatgcctatcagagatgtagataacttgttattgaataaaaatatagatgtctatgcgaatcgtggtgcgaatggtattgatggtatcgtttcaactgcactgggtatggctgtgcataaacgaataacattattgataggtgatttgtcattttatcatgatatgaatggactattaatgtcaaaattaaataatattcagatgaatattgtattattgaacaacgatggtggcggtattttttcatatttaccacaaaaagaaagtgcaaccgactattttgaacggttgtttggcacaccgacgggattggatttcgagtatacagctaagttatatcaattcgattttaaacgttttaacagtgtttcagaatttaaaaatgctacattgttatctgaaacttcgacgatttatgaattgataacgaatcgcgaagataactttaaacagcatcaaattttatatcagaaattgagtgaaatgattcatgacacattataattactatgaagcaaacgttgagaccaatcaagttttagtattactgcatggttttcttagcgacagtcgtacttatcataatcacatcgataaatatactgatatctgtcatgtcatcactatagatttaccaggacatggcgaagatcagtcttcaatggatgaaacgtggaattttgattatattacgacgttgttagatcgaattttagataaatataaagatcaatcgataacaatgcttggttattccatgggtgggcgtgttgcattatattatgcaattaatggtcacatccctatatctaatttgatattagaaagtacgtcaccaggtattaaagaagaagcaaatcaactggaacgtcgtcttgttgatgatgcacgtgctaaagtattagacatagcaggtattgaattatttgttaatgattgggaaaagttgccattatttcaatcgcaacaaggtttaccagttgaaatacaacttcaaataagacaacaacgattgtctcaatcgccaaagaaaatggccaaagcattaagagattatggtacaggtcaaatgccaaacttatggccgcgcctgaaagaaattaaagtaccaacattaatattagctggagaatatgatgaaaaatttgtacagattgcgaaaaaaatggcaaatttaattcctaatagtaaatgtaaattaatttctgctacaggtcatacaattcatgtggaagatagtgatgaatttgatacaatgatattaggatttttaaaggaggagcaaaatgactaacagacaatgggaaacacttagagaatatgatgaaatcaaatatgaattttacgaagggattgctaaggtaacaataaatcgccctgaagtacgcaatgcgtttacacctaaaacagttgctgaaatgattgacgcattttcacgtgcacgtgatgatcaaaacgtttcagttatcgtattaactggtgaaggtgatttagcattctgttctggtggtgaccagaagaaacgtggacatggtggttatgtaggtgaagaccaaatccctcgcttaaatgtattagatttacagcgtttaattcgtattattccaaaaccagttatcgcgatggtaaaaggttatgctgtaggtggcggtaatgtactaaatgttgtttgtgacttaacgattgctgctgataatgctatttttggacaaactggtcctaaagtaggttcatttgatgcgggttatggttcaggatatttagcacgtatcgttggacataagaaagcacgtgaaatttggtacttatgtcgtcaatacaatgcacaagaagctttagatatgggtctagtaaatacagtggtacctttagaaaaagttgaagatgaaactgtgcaatggtgtaaagagattatgaaacactcaccaacagctttacgattccttaaagcagctatgaatgctgacacagatggtttagctggtttacaacaaatggctggggatgcaacattgctttattacacaactgatgaagcgaaagaaggccgtgatgcgtttaaagaaaaacgtgatcctgacttcgatcaattccctaaattcccataagttattttgaatatgatattaagtcacttgcgtcgtttattagcgacgataggtggcttttttattttataagaatttaaaaggcttttttattaattatcataaagataagatagtttgagaaaaattaatagagaaagaataaatgttaaagattattattacaatgaaaaaacgagctggtgagaaattgaattctcgccaacccgctttatgaagtgaaatcatttaaattagttatactaagcgctcataaacgattgggcgcgaagtgccaataccttgtttggatgacgtttgcatgaggatatgctgtgtgtcatcataatcaaggatataaatgatttcttcattatcaatagatgaaaatttaatgcgttgatgtgccgtatcgataaaaagaatatgatattgattgtgacttgtatcatcgccatgacgtatacaaattgatttttgtaattgatgattactccaattaccaatgaataaattgatattggtttgttctagatgtgtgagttttgttgtgtcgtaaactaaatttataaattgtagttgatacatagttttacctgcctttaatcaatatctatattactttttagtaacctatcattgaaccataccaattataatcacgattgaatgataaatgtaataggcttgaatctgcatcttggattgataattctgtatcccaaggattccagtaaataagtttttcttggtcattaattttagcattaccaacaactgctagggcatgacctaaatgaggatcattagggttttgagatacactttgtgcaagaatcataatacctacattatcttttgtaagttgatcaacttgattatatgatggtacgccttcttgataatgaatatctctgccttgtgatttaccgtattcaatcatttgattagggaatgttgcacaattaggaaggtcttgctcacttacttcagggtataatgtacgcattatatcatgtgcattataagtgtctgtatttttagttgcatttaataatgctgccatactgaatcctgcacaccatgagttatcgaattgttgttctctaattttgaaattttttagtgtgttttcatattgaacttgatcttcttgtatcgcttcgttttcttcaaccttagtaggtgttactgtattttttagctcttgctttaattgtggtgaaactgttttagcactttctttttctttgatgttattagctagtggcgtagcttttactaatctaactttgccatcttcttcaaaataaaatcctttttcatcagtaagaacagtgatatttgaatttttatctttaatttggtctaaatctttagcgatgaagtttgaaattttaacactgtaattcatgtcttcttttgatttgtttaaatcatctttatttttagggctaagtgttaaagtataaacaattttaccgtcttttataactggataatagtaactattatcttcttcaccattaaatttataaattttaaaagcttcgccaagttcatatttaccagtttttgcattactttgtttatctaatgctttagcataaccagcaaattgttgttgtgctagatcctttactttttgaggtactttgtcactcttaacattaatttctagctgtttagagtgtgaatcggctttggctttattgttattagcaaatgcgcctagtgataaaataagcattgaaaccattataatgcttataatattgaatattctagatttacatgaactattcatataataccctccatttaagtcaaaatattttgcgttgctaagtctttgcttctatttactaaattcaaattaagatgaagtttatgcagcgtcagggttgtctgaattattgttatcgccattgtctggattattagggttgttaggttggtctgggttgttaggattgtccggattattagggttgtctggattgttaggattatcagggttgttagggttgtcatcatttgcgaaattgatatcttcaatattttgttttaagaagttgcgtacattttcattaataaatactgcaccgttaaattgatttggaacgccaccccaatgaatgccaatgacttcatttttttcattaaatacaggtgaacctgagttaccaccagttgtacttaaatcatattgcatagcttcgcctttgaggtaagtgatttttcctttactttcccacattgttgctacaggtttatcacctggataacctgttacagtaatattttggttaacttgtgtttcagcattattactcattgtggctggtttaacaacttcaccaatatgtttgttttgctcattaggggagaatttaacgattgctaaatcaccttcgcctgaatatttagtgatttgttcagcagtgaaaccaccatttggataattgtcttggttaattgcagaagggaaagcttttaaagcatgaggatcaccgtgcgtagcatctacgacgtgtttatttgttaaaagtgtatctttacctacaactacaccagaagcaataaatgtaccagtaggtgcttcaacttgaatataagtaacaggtgcataatgaccattcgttgtatctgtgatttggtgacgatcgttatttggtaatataacattagcgcgttcacgttgttctaatggtttaaggttaccgcctttttgaatcttaggtgtttgctgtttgtctgtctgcgtttgttgtggatgattgtccatagcttttgaagataacgcatttgctgctggagaactcacaagtgtcgctgttgtcaaagttgcaacgaataaagaactaacttttaaaaatttacctttcatctaaaaacctccaaaaaaattatttacaagttaaatataacactaaaaatttttaagtcaataataatatataaataaattaaaaagtttttgtaaagattagagtttacaaaaacattaagggaattaaaattgaattgtattatactttattctattgagttaaattgataaggttgtcaattgtttgcatttatctaaaagaataaataagaaaggaattgagaacgaagggaaagtatttgtttataataataaatagtaacgtttgaataataattgtttggccaaaggtagattaatatgaatggtgatatattatttgagtgcttaagtttcgaagaacaattttaagttagcatattacaagcttttgatagaatcatttaaaggagggaaaatgtccttgaagtatgtacgctcactttagagtattatttaaaacttatagaatataaaaaactgaacgtactatgaatttcgttcacgacgtccagttcaacatatcatttttatttagtatttaaatatttagcaagtctcttcataccttcttttaaaacatccatttcataagcataggaaatcctcacaaatcctttaccgaattctgtaaaggatgagcctggcacgattgctaaatgtgttgattcaagtaaatcgacacaaaattcgaaatcgtcatcggtgatatgtttaatacttgggaaaatataaaacgcgccttcaggttgagcggtaatctcaaatcctaatttagttaattcggatactaaataattttttcgttctacataagcttcgttcatatatttaggagcttctacgccttcattcaacgctgttatacatgctatttgagctggaacattggcacaaatacaattataggcgtgcataaatgttaatttatcaatcaaatattgaggtcctaatagaaaaccaattcttattccggttgctgagtgtgatttacttaaaccaccaattaatattaattgatcacgaatgtcttcaaattcagcgaaggatacatgtttaccactaaatgtattttcagcataaatctcatcgctaataataaatatcggatatttttttaatacatttacgatatttaaaacttcatttctttttaaaactacgccagttggattagttggataatttaacaagacagcttttgtctttggagaaatatgactttctaacgcatcaggtgtaattttgaattgtgttgctgttgtatcaatataaattggtttaccacctagtacttcgatgagtggtatgtagcctgcataaattggtcccggtattataatttcatctccaggctcaatgatagaacgtaacgttgtgtctattgcttcacttgctccatttgtcacaataatttcttcaggatcataggaaaaatgataacgatttttgaagtattgactaattgcttcgcgagtttcaaataagcctttattgtgagagtatgatgtcttgtcattgttaatagcatctatatatgcctttttcacaacatcaggcatagggaagtctggttggccaatagttaaattaacacaatcatccaaattattcatacgatttgaaaattggcgaatacttggtgctcttaaatatttagaattagaatttaaagaaagtttcatttgtgacacctcaaatataaatcaaatattgtctaaaaatttagaaattaataatatcataacatacttttaaagcaaaaaagggtaaattacttaagctttatttgaaaaacgaaaaatgtctaaatacactatagtaactacttttcaaaatgaatgaagtggttacagttaatgtacttagacattatataattatgagtctttaaactgtgatggtctttgtaaattaattattggatttgtccatttacaaacaaagtttgtagataatacatatacgatgattacagatatacttaataaataaagatacgtcattaaagatataggattatcgaatgggtaccattcaaatcctctaacaatgccaataattaaaccatgtaataaatatacgtatagcgtacgactaccaatataagtatataattttttctttgttgacattaaatttaaaaacgcagtcattgcgattaatataattccatataatataagtcgtttaaaaggactgaatacactctgtccttcattttcaagtgaagtatatggtgaacttcctaataaccaatctgcattgataggatgaatcacgtaaatgataaaaaacaaaataaaggtaatgatagatactggtattagttttttatttttaaaaatagccgtatgttttttggtgaaaatgtaacctaggtaaaatattgggaaaaatacgattgtccttgaaatgcttaagtagctatcgatgttatctgaaaaacctgctccaatagatataataattgaaactgatagcactttataaggattaaatcttctaactattactaaaatgacatgaaagaaaaatagcgtgatcaaaaaccataacgcaaatactgggttaaaaggatcaagttgtaattcgtcacttttacctgttaagaaatagtatattgaaaagaatgcaaaaaatatcatataaggtactatcaagcgttttgaaattttttctaaatagtatggtttatcaatatttttcgcgaaataaccagatataaacaaaaatgttggcatatggaaactataaataactaggtataatgctgataaatatttatcgccactagtgtagggttgtaacatatgtccaaatacgactaataatattaaaattgctcttgcgttgtcaaaaaaataatctctctcttttaatgaagtcatattttatctcctttatgtccataagactcttactaatttattatattttgtattagttatgcaacaaatttgtctattgtgtcgaatagtattgtaaaaattataaaaaaagcatataatattataaataatatgtagtggagtagaacaacatgtataaacaacttgaaaaacttattacactgactaacaatgacttaaacttagtgaatagaagatttggacaacgcacggatatcacctctgaacagctagaacttctccgtattttatttaattacgatcgcttatcacagtatgatttgacgatgaagattagcagggaacaatctatagtttcaaggtggattaagaaattagttttgaaagggtacatcacaagtcaacaatctagcgaagatttaagatgtaaagaattaattttgactgatcaagcacgtacattgatttcacaaataaataatgcacgttgcgaattgattgaagcaagatgtcaatgtttatcggaagtcgaattagacaatttaaatcaattacttgataagttaaatcaacgacgcatttcattgtaacacggcaatagcaaacacataatttagtgtcattgtgcacacaacaaaaattgaatcatgaattacaagcaaaagtagcggtgattgttaaaattgatggtaaacaatcaccgctatttttgcttgtgtatgtataaaaaagggatcaaaggtcatcccccatgattgatagtggggggatgacttttgatcctatgttcatgttgcttatttatattgtgggatgtcgaagtatttgccgacttcgccaattttatcatagtagcctttgatgattttagcattgatgttagcccaatctacatctgtagcatattggtgtgttcctggatgtgcaggattccatctcattttgtaaagtgtattttgaccagctttaacatatgagttgccgatgaatttagcaccaccaacgattgcttttgatactgtgtcccaaccagcttgtttagcatatttaataccttcacgtaaaggatcgttatcatatgcagcaataccaaatacgttatggtatttcgtgtttgagttagttacaactttgttgttcactacatctgcaccttttgctaattgagaagtaccgttacctgtttctaatagggcatgtgagataagataaacttcattaatgccatacatttgagcagctttgttaaatgcagcaccttggttttctaatacacctttaccttttaagaattgattaattttatcaatagaaatattttgtggttggtctaagcgtaagaattgatattttaatgctggatcttgagctaaacgtttcgtatccattgcatgcttaacatcattaaagttagcatctgtccacttacctggtacacgttgtacttgtggtttatattgtaaaccagcttgtatttgagcaacttggtttaatgtcatacctgtttgattatacttaattaattctttagctaaatcagttgatttaatccatgctaatttaccgttagataatttaccatagtaccaagtttgtccattaatgacttgttctttaacaactgagaatggttgttcattaaatgcttttaatgagtatttagctgtatcagaatttggtgttacatagtaataaccattaccatttttaattacataagtgtagttataatctttggcagctgatgtagttggtttaacagcagttggtgcagttaaatcttttgcatttacccaaccagtgcggttattaatagtaccgtataaataaacatctttgcctacagatacttgtttcgctgcattaaatgtaccttgagcaatgttattgcctgttaaaatgacttggtttttagtaccccaaggaaccattgataagccgttatttgatttattaacagtatatttttgagttgttttaacttctttgcctaagttttgaacatttaagtctttaacattgaaccaacctaatggaatattatgacttgtattatttaataatacgtatgtttcattaccatgtgcacgttcttttgttacatagaatgtacgatccgcatatttcgcaccgcttttcgctgttttttcataaacagaagcacgaataccagtgttgtttggtttaacttgagcaattttgctaactgtttgagttgtttgtggtttagtaacagcataagcttttacagcagtttttggttgtgctacagcttttttaggtgcagcaggtacagctaaatatgctttacttatccaaccagatttaccatttacagttccatataaatagatagatttatcaatttgttgttgcttagtcgctttaaaagtttggttacctgtaccagataccgcaccagcttcttgtttataagtaccccaaggtactgaatataatttagtgcctggttttactgtatatgtttgcattacatttacaggtgattttgcattgttataaataacatcaccttgtttaacccaaccaattaatgttggactattgtaatctttaactaagtagaatttgttgccacctagacttgcttcttttgttactgcaaatgttttttgaacttcttttgttggcttaccagttttgtcataaactgtagtgaataagccattgtttttagcattaatttgagcaacgccatttaatgctgagactgttaatttattatttgttgtcggcgttgatggcttaggtgttggtgcaggcgtaggtttagcagtatcaactaaatatgctttacttacccaaccagatttaccattcacagagccatataaataaatagatttatcaatttgttgttgctttgaagccttaaatgtttggtttccagagccagacacgctgccagcaacttgtttagatgtaccccaaggtactgtataaagtttcgtaccaggtttgattgaataggattgatttacatttacaggtgatttagctgtgttgtaaaccacatcgccttctttaacccaaccaaatttattaccagaattgtaatcttgtacaagatagaatttttgattacctaatgtagctgttttagatacagcaaatgttttttgaacttcattagttgctttaccagttttgtcgtaaacagtagtatataagccactatttgtcggtttaatttgagcaacaccattattagcagcaacagttaatttaccagttgatggtgtcgacggtgttgatggttttgatggtgtagtaggggtagttgtagattgtgtgccccaaggcgcaacttttcccattttaattaaatatttttcattaattaagtcatatagttgatcataactataattatgacttcttaaatatccatgtggatcggcatggtccgtaccacctaaatatttacttacagcgtagtgagtccatactgtaccttttccatcatattcagcactatcaggttttaaaccataatattgcaattgtgtagctgcatagtcagcatagttattcattgaacgtgcaaatgaagcataatcgtgtgtatgaacgatttcaacattgatgaatctagggttaccgactgcaccgacaccccaagataagtaatcggttggtgctgtttcgattatacgatccccatcaacaaatgcatgaacgaatgcgttttgatagttgtttttcatataactaatttcaccatttatcgtcgaacgatcattagctgtatcatgaactacgataccttcaggacgcccaacaccgttacggtatgcgtatttagggaagtaagatgtataatcttcttcaatcttaggtgcttttaaattatttttacgaatgtaatcgttaattgaagagtttacttgtggtttatattttggcaaactcgtttttggtgctgcagcggctgatcttggttgtgctgaagcactaaaagtagttacttttggtgtagcttcagttttagctttaggtgcaacaggtgttgcatttggtgctgcggctttatattgcgtttcaagagcagcaggtttagcagctgatttaattaattctggattaatttgattttctgaattatcatcttcatcatcaactaaactatatccagcacttgtaacattattgttcgttttaggtgctgtagtgtttgttgactttgtaacaggtttcgcattatttgatgtagttgattgagtcacacgagtgtcaccatttacttgtgtagtatcaaccttttgatttgcttgagcattgcctgttttattcgctgcttttggttggacaatagcagggtcttgatatacttgagtgccagaaatgttttgcgttggattttttacctcagcttttgcttgttcagtagttgctttaactttattactatctaaaacgtttttattagtagtttgatcttgtgtcgtctcagctgcttgaacttgatgtgcagtgactgctgaacctacaagcgttaatgcaaccattgatggtagtttgtaattaaattttttcgccattctatttattactcctaacatttattaattattaatctcattatagtacctgttttatacacctgtgcgtatttaaccaatttgtaatatactcttaatttatattttcactgtaaaaaaatgaaaaaaattttgaatctcaatggtgacgtgataaatcaaatagaattgatgtcaatttaagaattggtttattacaaatgtttctaaaatagatacaactttttttaattaagcgaggtcaacttttttgtcatttcaatatgctcgatgccttcctcaagaaatatattacctctcattttaaaatttaaactttcatagaatgggattgcatgacattgggcattcatagtagctacgtaaaaaccttcatctttagctaatgattctacagcttgcataagcattctacctatgccttgtccgcgatgtgattttatcacagccactcgttctattttgacagttgtttcattgatagggcgtatacgagctgtggcaactggctgttcattatcatatccaatgaggtgaatagattcagattcatattcatcaatttcactttcctctgggacgccttgttcttctacaaacactttctttcttatatagaagcaatcttctaacatctcttgattgtttacttttgaaaacataaaattcctccatatcctaacaaaatcatttacatttaatttactaataataacatagaataacgattgctattttccacaaaaataattagatataaaaaagctataaagatgattcacaggaatcatctttatagctagatagagtgtattttttataatgcttcttttctaataattgctgtatattgccaaaagattcgcatttgagcaatattccaattattcattcccattgtaaacccagaaggtttaaagatgttcacatcagttacttctaaagctgctgcgactaaatattgtaatggaatactaagtgatttcatcgtttcagtaatgccattttcatcatatacccatgaaaatggaagttctgatttgaaaacatcaacactattgaaaatttcaggtagggctaaaatataacatgcaccatctacaataggattgtcgatactatttttgtaataaattaggagtgcttcatagttttcacgatgctcatgattaacgtaaaaaaattcacttctaaaatgagccatatcttggctatgaataatttgttgttctaacatattaaacatcccatttatatttgcaatcttttcgtatgtttttctactcatgtatgatgctcctttcataaatagtaaatgttaatcgtcatataatattagtttacaacaccattttggttatttgaagcttgtggcgtttgttgagtgccaccttgattttgatttaagttttgatctgtagcaggttgttgttgattattgacgctattgttgttattactattattactgtcatcagtattattcgaagatttatctttatcagtggtatcgttttgttcttttcttaataaactactatctaaaggtgttaaaggtatgagagaaccataatgattaatgacacgttgatctaagaaatcatttttatcattaataggtgataattctaagtctttacgaagtaagtttgcatatttttgaatgctttctacacttggatgataatagtaaataccatttaacatatcatctttaccttttaattgcgcagttttaatttcaacatcatttgttaagtacatttttgctaaagctttaatttcagagttagttaaattatgctttgcatttttacctacaatttgaatcacgttatcaagtttatcaatagaatcaacttcctgtgctttttggaataaaatcttaattaattccatttgtcgttgaccacgtttcaagtctgagtcatgatgtctagttctagcaactgcaagagcttcatccccatttaatttttggtacccttttttaattttaatcttaccagtatcatctgtatttggctcatttaaatcatatggtacatcatagtatataccaccaagttcatttacagcttctacaaatgccttcatattaacgcgtacatagtaatcaacgggaacattcatcgttgcttcaacagagtccattgctgcaattggaccaccatatgcatgtgcatgggtaatcttatcgtaatagccgactttaggaatgtagctgattgtatcacgaggaatactaagcattcgaatttggtgtttagattgattaaaagtagttaaaatcatagcatctgatctagagtgttcagcatcttggcctttttttcttcttccatcattatcatcgatacctaagaaaaggatagagataggttgttcttcaggattgactttattgtctcgtaaatttgattgacgattagcatttttactatcttgagaagattcaaatgcatcttgagacgttttaaaaagtaacgtagcgaagacaattggaacaacaataagaaccaatgctagaaggatcaaaaagtattttaaaaatttattcatgattgatgctcctatattaaatttttgttaaatcataatcataattttaaaatataattagttgaacgatatttatacaacttcattactaatacattatagccttaaattgtagtactttatagtaaaaaatacaaatgttatgtcaaagttccttgtaatttgaatgttttgtcaaaatcaaaaagcatttttaaaaatataatgcgacttttgtatgatgtcttaaaaaaattaaaggggtaatataaatttgagtgatttatacaatgtgataaggtataattaaatttgttgtaataagaacttatatgacgaaaatattactaagtagtataacgcataagtgggtgacagataaaattgtaagtgatattataacgaagttaaggttattgttttaattatttaatttgaatacaatgagaggctattagcgaatgaaatttaataaagtgaaattggttatacatgcatgcgtgcttttattcatcattatctctataggattagtttttcatcgattacaaacgaaaacgaactctatagaacctatacataaggaaacaaaattatcggataatgcgaaatatttgattgatcgtaataaaggcaaaggtgaaccatcgaaattaaaggaagtatacaatagtaaagatccaaagtataagaagattgaccggtatttacaaaattcattatttaatggttctgtagcgatatatgaaaatggcaaattgaaaatgagtaagggctatggttatcaagattttgaaaaaggaattaaaaatacaccaaatacgatgtttctaattggttcagctcaaaaattttcaacaggattactgttaaaacagttagaagaagaacataaaattaatattaatgatccagtaagcaaatatattccatggtttaaaacatctaagcccattcctttaaaagacttgatgctgcatcaaagtggattatataaatataaatcttcaaaagactataagaacttagatcaagcagtgagagcaattcaaaagcgtggcattgatcctaagaaatacaaaaagcatatgtataatgatgggaattatttagtgctagctaaagttatcgaagaagttaccggcaaatcatatgccgaaaattactatacaaaaataggggatccattaaaacttcagcattcagcattttatgatgaaaaatcatttagaaaatatttagcaaaaggttattcttataatagtacaggactttctttcttgaagcctaatgttttagaacaatattatggtgcaggtaatatatatatgacaccaacagatatgggtaaattaattactcaaattcaacaatataagttattcagtcctaaaataaccaacccattattacatgagtttggtacgaaacagtatcctgatgagtatcgatatggtttttatgttaaaccaacattaaatcgtttaaatggtggattcttcggacaagtatttacagtttactacaatgataaatatataatagtacttgcattaaatgttaaagggaataacgaagttcgaatcaaacatatatataatgatattttaaaacaaaataaaccttacaatacgaagggtgttgtcattcaataattaatatagaagatataacatgtacatggcattaaggcatcgaccttatctgaccagtatacaagttatatcttcttttttatagtggtaaaaagtttaaagtataaggttgaagtagtagggtgataaatttgcgttaagttaaaaagatataaacaattgatgtaaatgtcaatataaaaatgtgcataaatgattgtataagaatgtattaattgaattgataatattgatcgtcctataagatatagaaggggacttaaccatttgaaaattgaaggataataaaaaccagctaacaaaagtgttagctggttaaactttacattattaaaatgttgtttataagtgtgaagagtgaccgccttgcataacccaatatgttccgacaacgaaacaaagtgtgattacaagagcaaagataactttgaatgtttgtaaacgtccatctttaccttcagttaaatgcatgaacattaataattgaagtccagcttggatgaatgcaaagccaaagataattgtcaacttcgcgtggaatgttaatgacgtgtatagtgttacgtaaactgctaaaagcgttaatacgatagatgcgataaatcctacagtatgtttcataattgtactcatccgctatacaccatccctatcatatatacggcagtaaagatgaaaacccaaacaacatctaagaagtgccagtataaacttactataaataattttggcgcattatatttgtctaatccgcgtcgttggatttggattaataaacaaatggcccaaacgatacctaaagttacgtgacaaccatgtgttcctaataggatgaagaaactagaccagtaagaaccaattgttgggttaacgccttctgatgcatagtgtgcgaattcataaatttcgaatcctacaaagactaaacctaaaagtaacgtaatgatcatccaaaacatcattaacttttgtttttcttggcgcatgtagtaaatagcaataccacatgtgtaagaactgaataataatgcaaacgtcattattaaaacaagaggcaattcaaataactcagtagtcatttttcctgcataatcgccaccatgttgcaaagttaatagtgtcgcaaatagggtaccgaataacgcaaattcggctgtaatgaaaatccaaaagccaagcttatttaattcgccttcatgtgtgcgtgaatcaatagtgtttgtatcatgactcatgacttacagcctccctttctttaatacgcgcttctcttaatctagcttcagtttcagcaacttcagcagcagggatatgatatccgtgatcgatttggaaactgcgataaatcatagtaccaaaaataccgaataaacaaattaatgctggaattacagtttcgaaaattaagaagaaaccgccgatagtcataaagataccaatccagaatccaacaggagtattgtttggcatatgaatgtctttgtaattatggttgtctaagtaatgacgaccatgttctttcatatcaacaaatgtgtcgtagtcattccaatctggtgtaatggcaaagttgtatttaggtggaattgctgatgcagtagtccactctaaagtacgaccaaggccatcccagttatctccagttgcttcacgtggagatttgaagtgactgtatacgatactaacaacaaggaataagaatccgattgccattaataatgcaccgatagttgaaattaagtttaataagaaccaaccatctgatggcatataagtgtataaacgacgtggcataccatctaatccaagtatgaattgtggtaagaaacaaacgttaaatccgatcatgaagaaccagaagcaccatttgtttaatgtttcgtttaatttgtaacccatcatctttggataccagaagattaaaccagctaagcaggcaaatacaacaccagtaaccaatgtatagtggaagtgagctactaagaagtacgtattgtgatattgatagtcagcagatgccattgctaacattacacccgtaacaccacctaaaaggaagttagggataaatgctaatgagaataacattggtgactcaaatgtaatacgtcctttatataatgttaataaccagttaaacaatttcacaccagttggaataccaatcagcattgttgaaattgagaagaatgagttgattaacgcaccattacccattgtgaagaaatggtgaacccaaactaagaaactaaggaacgcgataccggcagttgcccataccatactttgatgtccgaataaacgcttacgagcgaatgtcggaataatttctgagtaaataccaaatgctggaaggataacgatataaacttcagggtgcccccatacccagaagaagttagcccaaagcattggcataccaccatgtgcaactgtgaagaatgctgtgtcaaatattctatcagttgtcattaatgctaacgctactgttaaaggagggaaagcaagaataacaattaatgtagtaataaatgttgttactgtaaacattggcatttgcataaacttcatagttggtgttttacatcttaaaattgtaacaaagaagttgatacctgtagctaaggtaccaagccctgaaatttgtatagctattaagtaatagttaacacccggaccaggactgaattcacctgctagtggcgcatagtttgtccaaccagctgctggtgaaccaccaataataaatgacaggttgaataaaatcatacctgcaaagaatagccagaaacttacgttgtttaatactgggaatgcaacatcacgtgctccaatttgtaatggaacaacgatattccataaaccaaagataaatggcattgccatgaagataatcatgattacaccatgtgtactaaaaatttcgttatagtggttagattctaaaaatttgttatcaggtactgttaattgcgcacgaataagtaacgcatcaataccaccacggacgaacattaatacggcacagattaaatacataataccgattttcttatggtctacagatgtgaaccattctttgtaaagatatttccataatttaaagtaagtaattactgcgattaaaccaataactaagaatggggcaccaatttgtgccattgtaatcatccagttacctttaactagtaattgatcccatggaaaattcattaatgtccacctccatgatcatcattgtcttgatcttgcgcatcttttgaaattttcttcatttctttcgcatttttcgattcatctttcttgaactcattgttatatggttcgtcatttccaagaatcatcaatttcataccatgtcgtttatagttcgcatttgtaatttgagctttacgagcaggtattaatggtttgtctgatacatctttaaacatattttcttcactagtgaagtttggatctttcaattcgaaattgaaacgtttatatgcatagaagatgtattctggatcggctgctggatcaacaaacgccatatgtgtaccattaaattctaaagctttattaggtgtgcttggtaataattgtttatcaaatgtatcttgatctaacgttttcttacctttaacttctttcacccatttgtcgtagtctttttgactaacggcatttactttaaatgtttgacgtgagaatccttcaccattgaagttagagttacgacctctgaacgtaccagtttgagatgcttctaacgtccaattcattgtcatgccagtcatggcatatttttgaccacctaattgtggaatccagaaacttgtcattgtatccatagcttgaagcttaaatacaacaggacgatctttagggattgttaatgtattaacagtctctatatgttcatctggataagcaaagaaccatttgtatcctgcacttactgcatatacaaccattggatctttctcactcttcggtggtttttcgtaatcgtataaagttttaactgtaggaatagctaaagcagcaacgattatgataggtattacaaaccatattgtttcaatgatggcattatggtgcatcttaccagattcggcattcttattataactatacttgtaaataaaaatggcgaacatgccaagtacaacgaaacaaataacaagcatgaagacgattgaataaagaatcaagaacttctgactacttgctactggcccttttgcgttgaaaatttctatatttgaacaaccactaagtaaaattagtgtgccaaataatagaagcaaagacttaaattttgacacttttttgacctcctaatactacaaatgtagggcttaacattaattttaagttattacacaatatttacaagggcttatgggaaaaaaattaataaaattgtatcaaaaatgttgataaatcaaggtgtgacgtgggttcacacatttgttaaaattatgtgtacattttgtgactaatagtgtttttgaaaaaattgcttcatatttaaaagggaagttgagaatagctttcaattaaaggctaattgaatgaaaataaaaaaagtttgaaattgtctaataaattgaaagtgatggctagttcattgaaaggaagcgcaaacattttaataaggaatttgccaaaagtaatttatcgttaaacaatgaaaagtggaaatttgtttgttcaaaatcaaaacattcttttaaaaagagcagttaagttttaataatttgataggtagtcctttggtatacagaaaaaatacaatatttgggttaaagttgcagatgaagttggaataacaaataaaatggtagcaaaacatgtacgtttgctaccattttatttgcagtatagtgatgagggctatttaacctcaatatacctagtggaaattttaattgcaccatctgaatcagtgacatgatatttaatttgatatttaccagatttagatgtatcaatttggccatcgactttaattttatcggttaaatctccatcttctttatcaaatgcacttatgccgtttagaaggttataatcttgacctttcttaataacgatatcattagcgcctttaatttgtggtgtagtattcgtcgttgcatctgcatttaaatttggtgttactagtgtagcagaaacaccgagggctgataatgactgtaatagtttattcataatgtaacctccgaatgataagtcatttctgagttagctttactataccttaatttatattatttacacatcatactatagtcctaatcttaccctataaagaatgaaatttaaatataaatttataaataatgaggaaataattattattttgaaaatctgccacaattgtaaaattaataattcaaggataatttgaaatcaaatataactttattcgacagtttgaacttaaattgttgtgcatcataacaataagaaaagggaggcaataatgataaagaaccactaatgatttattatgtagtagtattttatcattagtcacagcttctgtgttggggcctcgccgacttgcattgtctgtagaaattgggaatccaatttctctttgttggggcccctgactagaattgaaaaaagcttgttacaagcttttttcattcaattaactactgactatataaaattgttgagcctagaacaatgtgaaatgctcccttcaaagccttcattttttcaatgtctactttgaggggagcatttgattgattaatgttccagatttttcttgttattcattgcaattgcgaaataatatttaatgtgggttaaaagagttcattaaaactcagttattagggagtgggacagaaatgatattttcgtaaaatttatttcgtcgtcccaccccaacttgcattgtctgtagaaattgggaatccaatttctctttgttggggccccgccggcaaggttgactagaattgaaaaaagcttgttacaagcgaattttcgttcagtcaactactgccattataactttgtagagcatagaacattgatttatgtctcaggctctttacgaatcaatacctcgacgcattttttctgcaagcaaagtattatttaataccatagtaattgttaatgggccaacgccaccaggaactggtgtaatagctccagcaatttctttaactgcatcataatcaacgtcaccttttaatttgccatcttcatctggcgtattaccaacatcgataattactgctccttctttgacaacatcttttgttactaaaccaggcttaccaactgcactgacaatgacatcagcatcttttaaatatgatgccatatcctttgaacgagaatgtaagattgttactgatgcatttttttgaagtagtaacttagaaactggttgtccaacaatatgacttcgtccaattacaactgcatttttaccttctaaatcaatatcagcatgttttaatatttccatgatgccgagcggtgtgcaaggtacaaaagtttgttcatcgatatataatttccctatattaattggatgaaaaccgtccacatctttatcaggattgattgcttctaatattttctgttcgctaacttgttttggtagtggtacttgtaccaaaataccacttacagaatcatcattatttagtctatttagttcgtttaatacttcttcttcagtagctgtttcttccaaatgtacgatttctgaaatcataccaattttttcagctgctttcttttttgatctaacataactttgactagcgccatcattaccaactaatataacggataatttaggtgtaaaacccttttcttttagcgcttcaacttgattttgtaacccctgtctgtagtctttggcaatttgtttaccatctaaaattttagcaaccataaaaacttctcctcctattgtcaatatcctaactttgttagtttataaaactaatttatatagcaaaagacgtaaattcaaacaaaaaaccaaaataaagttcgatttttgattgaaaaagcagaaattgcttgttatgctatatctataatatacaactaaagtaattcacaattcaaacttttgaaagggtgtacaaagtgaaagtagcagtcattatgggcagttcttccgattggaaaattatgcaagagagttgtaacatgttggattattttgaaattccgtacgaaaaacaagtagtatccgcacatcgtacgccaaaaatgatggttcaatttgcttctgaagcgagagaaagaggtatagacattatcattgcaggcgctggcggtgcggcacatttaccaggtatggttgcatcattaacaacgctaccagttattggagtaccaattgaaacaaaaagtttaaagggtctagattctttattatctattgttcaaatgccaggaggtattccggttgcaacgactgcaattggtgcagcaggtgctaaaaatgcaggtatacttgcagcaagaatgttaagtattcaaaatccttctttagttgaaaaactaaatcaatatgaatcttcgttaattcaaaaagtggaggacatgcaaaatgaacttcaataaattaaagtttggtgcgactattggcattattggtggtggtcagcttggaaagatgatggcacaatcagctcaaaaaatgggttataaagtggctgtattggatcctactgaagattgtccatgtagatacgttgcacacgaatttatacaagccaagtatgacgatgaaaaggcactcaatcaattaggacaaaaatgtgatgtgattacttatgaatttgaaaacatttcagcccaacaattaaaactattatgtgaaaagtacaatattccgcaaggttaccaagctatacagttattacaagaccgcttaactgaaaaagaaacattaaaaagtgctggtaccaaagttgtcccattcatttcagtaaaagaatctacagatattgacaaagcaattgaaacattaggatatccttttattgtaaaaactagatttggtggctacgatggcaaaggtcaagttttaattaacaacgaaaaagacttacaagaaggttttaaattaattgaaactagtgaatgcgtagctgaaaaatatttgaatatcaagaaagaagtatcacttactgttacaagaggagacaacaatcaaatcacttatttcccattacaagaaaatgagcatagaaatcaaatacttttcaaaacaattgttccagcgagaatagataaaacagctgaggcgaaagagcaagttaataaaattatccaatcgattcatttcattggaacatttacagttgaattttttatagatagtaacaaccaattgtatgtgaacgagattgcaccaaggcctcacaattccggacattattcaattgaagcgtgtgattattcacaatttgatactcatattttagcagttaccggacaatcattaccaaattcaattgaattattaaagcctgcagtcatgatgaacttactaggtaaagacttagatttattggaaaatgaatttaatgaacatccagagtggcacttacatatttatggtaagtctgagcgtaaagataacagaaaaatgggtcatatgactgtactaacgaatgatgtaaaccaaactgaacaagatatgtacgctaaatttgaggggagtaattaaagcatgacattattatatgaaggaaaagcgaagcgcattttctcaacaaatcaagaaaatgaattaagagttgaatataaagatgaagttactgctggaaacggtgctaagaaagacacaatggcaggtaaggggcgattaaataatcaaattacttctattatatttaaatatttacaagaaaatggaatagaaagtcactttattaagcaattatctgaaacagaacaattagttaagcctgtgaaaataattccattagaagtagttgttcgtaatattgctagcggatctattacaaagcgtttaggttttgaaaatggtgaagtttttagagaaccacttgtggaatttttctataaaaatgatgcattaaatgatcctttgattacagatgatcacatcaaattactgaatattgcgacagataaagatattgaaacattaaaaacgaaagcgctagaaattaatcaagtattaaaacaattaatggatgcgatgaatttaaaattagtagattttaaaatcgaatttggaaagactgagactgatcaaattttgttagcggatgaaatatctccagatacatgtcgaatttgggataaagctaccaatgcaaactttgataaagatgtatatagaaataacactggatcactgattgaaacatatcaaatatttttaaacaaattggaggatttaaaataatgaaaacaattgaactacatatcacattacaaccacaagtattagatacgcaaggacaaacgcttactcgagctgtacatgatttaggttatgcacaagtgaatgatattcgtgtaggaaaagtattatatatgacagtggatgaggttagtgatgaaaaggtacacaacattattacaactctaagtgaaaaattgtttgcaaatacagtgattgaagaatatagctataaagtgttagatgatgaaaaggagaatgcataaaatgaaatttgcggttcttgtttttccaggttcgaattgtgatagagacatgtttaatgctgctattaaaagtggtgttgaagcggaatatgtagattatagagaaacatcactaagtggatttgatggcgtacttattcctggtggattttcattcggggattacttaagatctggggcaatggctagtgtagcgccgattatttctgaagttaaacgtcttgcagctgaaggtaagccagtattaggtgtttgtaatgggtttcaaattttaactgaaattggcttattacctggtgcattattgcataacgattcacatttatttattagtagaaatgaagagttagaaatagtgaataatcaaacggcatttacaaatctttatgaacaaggtgaaaaagttatatatcctgtagctcacggtgaaggtcattattattgtactgatgaaatatatcaacaattaaaaactaacaatcaaattattctgaaatatgtgaataatccgaacggttcatatgatgatattgcaggaattgttaacgaaaaaggcaatgtgtgtggcatgatgccacatcctgaaagagctttagaaacgttgttaggtactgatagtggtgtgaaattatttgaagcgatggtaaaaagttggagggaacaacatgtctaaatttatcgaaccaagcgttgaagaaattaaacttgaaaaagtatatcaagatatgggattaagtgatcaagaatatgaaaaagtttgcgatattttaggcagacaacctaactttacagaaacaggtatcttttctgttatgtggagtgaacattgttcttataaacattctaaaccgtttttaaagcaatttcctacgtcaggtgagcatgtgcttatgggtccaggtgaaggtgcaggggtagtcgatatcggtgataatcaagccgtagtatttaaagtagaatctcacaatcatccatcagcaattgaaccataccaaggggctgctacaggcgttggtggaatcattcgtgacattgtctctattggggctagacctattaatttgttaaacagtcttagatttggagaattagataataagcaaaaccaacgattacttaaaggtgttgttaaagggataggtggctacggcaactgtattggtataccaacaacagctggtgaaattgaatttgatgaacgatacgatggcaatccactagttaatgcaatgtgcgttggtgttatcaatcacgacatgattcaaaaaggcacagcaaaaggtgtaggtaattcggtcatttatgttggtttgaaaactggtcgagatggtattcatggtgctacttttgcatctgaagaattgacggaagaaagcgaaagtaaacgaccttctgtacaaatcggtgatccatttgtaggtaaaaaattaatggaagcaacacttgaagcaattacatttgatgaattagttggtattcaagatatgggtgctgctggtttaacatcttcatcttctgaaatggcggcaaaaggtggtagtggtttacatttgagattagaacaagtgccaacacgtgagccaggtatttctccttacgaaatgatgctttcagaaactcaagaacgtatgttactagttgttgaaaaaggtactgaacaaaaattcttagatttatttgataagcacgaattggatagtgctgttataggtgaagttacagatacaaatcgttttgttttaacatatgaagacgaagtttatgctgacattccagttgaaccactagctgatgaagcacctgtatatattttagaaggagaagaaaaaaattataatacttctaaaaatgattatacacacatcgatgttaaagatactttctttaaattacttaaacatccgactatagcatctaaacactatttatatgatcaatacgaccaacaagttggtgccaatacgataattaagccaggacttcaagcatcggtagttcgtgtggaaggcacaaataaggcaattgcttcaacaattgatggtgaagcgcgttatgtatataacaatccatatgaaggtggaaagatggtagtagctgaagcttatcgtaatttaattgcggttggagccacaccattagcaatgactgactgcttaaattatggttctcctgaaaagaaagaaatttatcaacagctgatagattcaacgaagggtatggcagaagcatgcgaaattcttaagacaccagtagtttctggtaatgtatctttatataacgaaacgaaaggtacttctattttcccaacaccagttgttggaatggtaggtttgattgaaaatgtaaattatttaaatgattttgaacctcaagttggagataaattatatttaatcggtgatactaaggacgactttggtggtagtcaacttgaaaagttaatttatggcaaagttaatcatgaatatgagccattagatttgagttcagaagttgaaaaaggtgaatcaatcaagaccgctattcgtgaaggactattatcacatgttcaaacagttggtaaaggtggcttactgattaccttagctaaactaagtgcgcattacggtttaggattaaagtcttcaatagatataacaaatgcacaattgtttagtgagacacaaggccgatatgttgtttctgttaaatcaggtaaaactttaaatattgataatgcaatagaaattggacttttaacagatagtgataatttcaaagtaacaacaccatatacagagattagtgaaaatgtttcagatattaaacaaatatgggaaggggcaattgctcaatgtttaactactcaggattaaacgaagaatgtggcgtgtttggtatttggaatcatcctgaagcagcgcaactaacatatatgggacttcatagtttgcaacatcgtggtcaagaaggtgcaggtatagttgtttctgatcaaaatgaattaaaaggcgagcgaggattaggcttactaactgaagcgattaaagatgaccaaatggaacgattaaaaggatatcaacatgcaattggtcacgtccgttatgctacttcaggtaataaaggtattgaaaatattcaaccgtttctgtatcacttttatgatatgagtgtaggtatttgtcataatggtaacctcattaatgctaaatcattgcgtcagaatttagaaaaacaaggtgctatcttccattcgtcttctgatactgaagtcattatgcatttgatacgtcgaagtaaagctcctacttttgaggaagcgttgaaagaaagtttgcgaaaagttaaaggcggttttacatttgcgattttaactaaagatgcgttatatggcgcagtagatccaaatgctatcagacctcttgttgtaggtaaaatgaaagatggtacatacatccttgcaagtgaaacatgtgcaatagatgtgttaggtgcagaatttgttcaagatattcatgcaggtgaatatgtcgtgattaacgataaaggtattacagttaaatcctatacacatcatacgacaactgcaatttctgcgatggaatatatttattttgcgagaccagactcaacaatagctggtaaaaatgtccatgcagtacgtaaagcttctggtaaaaaattagcccaagaaagccctgtaaacgctgatatggtcatcggtgtacctaattcatcattatctgcagcgagcggttatgctgaagaaatcggtttgccatatgaaatgggactagttaaaaatcaatatgttgcaagaacatttattcaaccaacgcaagagttacgtgaacaaggtgtaagggtgaagctatctgcagtgaaagatattgtagacggtaaaaatattattcttgttgatgattctattgttcgcggtacgacaattcgacgcattgtgaaaatgttaaaagattctggtgcaaataaagtgcatgtgcgtatagcatcgccggaatttatgttcccgagtttttatggaatcgatgtttcaacaacggcagaattaatttctgcaagcaaatcacctgaagaaattaaagattatattggcgctgattcgttagcatatctatctgtagatgggttaattgaatcaattggtttagattatgacgcgccttatagtggcttatgtgtagaaagtttcactggagattatcctgcagggttatatgattatgaagcaaattataaagcacatttaagtcatcgacaaaagcaatatatttctaaaaacaaacacttttttgatagcgagggaaatttaaatgtctaaagcatatgaacaatctggtgttaatattcatgctggttatgaatctgtagaaagaatgtctagtcatgttaaacgtacgatgcgtaaagaagttattggtggtttaggtggattcggtgctacatttgatttatcacaattaaatatgacagcgccagttttagtttctggaacagacggagtaggtacgaaattaaaactagctatcgactatggtaaacatgattcgataggtatcgatgcagttgcaatgtgtgttaatgatattttaacgacaggtgcagaaccattgtattttttagattatatcgctacaaataaagttgttcctgaagttattgaacaaattgttaaaggtattagtgatgcatgtgttgaaacgaatactgcacttatcggtggagagactgctgaaatgggtgaaatgtatcacgaaggcgaatatgatgtagctggatttgctgttggagtagttgaaaaggatgactatgtagatggttcagaagtaaaagagagacaagttgttatagggcttgcgtcaagtggcattcattcaaatggatacagtttagtgcgtaaattaattaatgaatcaggcattgatttggcatcaaacttcgataatcgtccatttatagatgtctttttagaaccaactaaattatatgtcaaacctgtacttgctttgaaaaaagaagtttctattaaggcaatgaatcatattactggtggaggtttttatgaaaatattccacgtgcattgccagccggatatgctgctagaattgatactacatcatttccaacgccaaaaatatttgattggttacaacagcaaggcaatattgacacaaatgaaatgtataacatttttaatatgggtattggctatacagttatcgttgatgaaaaagatgcatcacgcgcattgaagattttagccgaacaagatgtggaagcctatcagattggtcatattgtgaaaaatgagtcaactgcaattgaattgttgggggtataacaatggttaaaattgcgatttttgcatctggttcaggaagtaactttgaaaatatagttgatcatgttgaatcaggaaaacttgaaaatattgaagttacggcgctatatacggatcatcaaaatgcgttttgtatagatagagcaaaaaagcacgatatacctgtgtatattaatgaaccaaaacaatttgattcaaaagcagcgtatgaacaacatttagtaactttattaaataaagataaggtagagtggattattttagctggctacatgcgtctaattggtccagacttattagcttcatttgaaggtaaaatattgaatatacatccatctctattgccgaaatataaggggattgacgcaataggccaagcatatcatagtggcgatactattactggttcgacagtacattatgttgatagtggtatggatacgggagaaattattgaacagagacaatgtgatattagaccggacgattcaaaagaacaattagaagagaaagtaaaaaaattggaatatgagttatatccaagtgttattgctaaaattgtaaaataaggagtatgtatgtgatgaagaaagctattttgagcgtatcaaataaaacaggtattgtagagtttgctaaagcgttaacgcaattaaattatgaattatattcaacaggtggtactaaacgtatattagatgaagcaaatgtaccagttcgttctgtttcagatttaacacattttccagaaataatggatggccgtgttaaaacattacatccggctgttcatggtggcattttagctgatcgaaataaaccgcagcatttaaatgaattatcagaacaacatatagatttaattgatatggtagtagttaatttatatccattccaacaaactgttgcaaaccctgatgtgacgatggacgaagcaattgaaaatattgatattggtggtccaacaatgttacgtgctgcagctaaaaactataaacatgtaacgacaattgtacatcctgcagattatcaagaagtattgacgcgattaagaaacgattcgttagatgagtcgtatagacaatcattaatgatcaaagtttttgagcatactgcagaatatgatgaagcgattgtacgtttctttaaaggggataaagaaactttaagatatggagaaaatccacaacaatcagcgtattttgtgagaacttcgaatgctaagcacacgattgcaggcgctaaacaattacatgggaaacaattaagctataacaatattaaagatgcagatgctacactagctctagttaaaaagtttgatacacctgctgcagttgcagttaaacacatgaatccatgtggtgttggtatcggtgacacgatagaacaagcatttcaacatgcgtatgaagcggatagtcaatcaatatttggtggaattgttgcattaaaccgatctgtaacacctgagttagcagagcaattgcatagtatctttttggaagtcattattgcaccaaaatttacagatgaagcattagatattttaaaacaaaagaagaatgtaagattattagaaattgatatgactatagacagtaacgaagaagagtttgtttcagtatctggcggatatttagttcaagataaagacaattatgtcgtaccaaaagaagaaatgaaagttgttacagaagttgcacctactgatgaacaatgggaagcaatgttattaggatggaaagttgtaccatcagtaaaaagtaatgcaattattttaagtaataataaacaaactgtaggaataggtgctggacaaatgaatcgtgtcggtgctgctaaaattgcattagaaagagctattgaaatcaatgatcatgtggcgttagtatctgatggatttttccctatgggagatacagttgaacttgcagcacaacatggtataaaggcaattatccaaccgggtggttcgattaaagatcaagattcaattgatatggctaataaacatggtattgcaatggtagtcacaggcactcgacattttaaacactaattttaaaggggcgtaacataaatgaatgtattagtaattggtgctggtggacgagaacatgcacttgcatataaacttaatcaatcgaatctagttaaacaagtttttgtcattccaggtaatgaggcaatgacacctatagctgaagtacacactgaaatttcagaatctgatcatgaagctattgtcgattttgctaaaaagcaaagtgttgattgggtagttataggtccagaacaaccgctaattgatggactagcagacattttgcgagcgaatggtttcaaagtgtttggtccaaataaacaagcagctcaaatcgaaggctcaaaattatttgctaaaaagataatggaaaaatataatattccaactgctgattataaagaagttgagcgaaaaaaggatgctttaacatatattgaaaattgtgaattgcccgttgttgtcaagaaagatggattagctgctgggaaaggcgttattattgcagatactattgaagcagccagaagtgctattgagattatgtatggtgatgaagaagaaggtactgtagtatttgaaacgtttttagaaggtgaagagttctctctaatgacatttgttaatggtgatttagcagttcctttcgactgtattgcacaagatcataaacgcgcatttgatcatgatgaaggaccaaatactggtggtatgggggcttattgtccagtaccacatattagtgacgatgttttaaaacttacaaatgaaacgattgcacaacccattgcaaaggcaatgcttaatgaaggttatcaattcttcggtgtattatacattggtgctattctaactaaagatggtccaaaagtaatagaatttaatgcccgttttggtgatcctgaagctcaagtattattaagtcgcatggaaagtgatttaatgcagcatattattgatttagatgaaggaaaacgtactgaattcaaatggaaaaatgaagctattgtaggggtcatgttggcatcaaaaggatatcctgatgcatatgaaaaagggcataaagtaagtggctttgatttaaatgaaaactattttgttagtggattaaagaagcaaggtgatacctttgttacttcaggtggtagagttatacttgccatcggaaaaggtcacaatgtacatgatgcacagcgagacgcatacgaaaaagtatatcaaatacaaagtgaccatttattctatcgtcatgatattgcgaataaagcactacaacttaaataagtatatttaaaaatactaagattagctatgaacaaatctataacgatagattttttcatagcttttttagttgtagagtctaggacattgatttctgtaccaaatttgtgattatgtatatgtaatacaaaagaggcgccacaacatgtttggatgaacaaaataacatgtttgtggcacctcttttgtttagtatggaataaatggttttctttttctatacaatgaatttctaatttagtatctatacaattatggataaaatttaacctacacgaccaagacgaacatcatcaatgcccgtgatgggtaaggtgattgaacaataatatgccaaagtaataatggcaattaagactataataaagattacatctttatatgagaaaggtacgttgtaatagtaagtacgaggaccatctctaaatcctttcgactccatcgcaactgataattgatgtgcctttctaatgttttgacttaatagaggtatgattaaatgcttaaatcgctttaatcctctataatttgctgcgtctatcatctgatagcgcatttttaaagatctgcgaagctgtattaaagaactaatcattaaaggtatcatacgaatggcagccatgaatgcataagcaactttggatttaacctttaaatgttgcattaaactataaaaaatcatgacaacctgagatgtgagtgcgattaagataccgaaaaatgaaatagcaatggttcttaatgaaacatgtaaaccacgaactaaactttctgttgtaatatggataaatccgaatttcaaaattgtatggctaccgttcccgtataaaatcatgaacagggaagagagtaatgcaaagccaatacttatagttataaaaattgctgtaattttaaactgagtaccattaaacagcaataagaaaactaacattaaggtagtgatataaagcataaaatcgaaattatgaacaaatataataaagaaaaatagtataattccaagaaatagtttcgttataatgttgacatcatcaacaaatgattgccgaactttccattgctcatacattcgtatcaccatcacaatcttgtaacgcaccatctgaaattttaagtcttcttgatggataacgttcaattatttcatcgtcatgtgtaaccatgacaatacttagtcccaaattaatgcgtttttggaaaagtttgatcaactggaatgtattatggctatcaagtccaaatgtcggttcatctaaaaagatgatatcagctttagaacttagtgcggtagctacgctaaggcgtcgtttttgaccaatagacaactcatatggatgttgatctttaacattttctaaatctaaaagttttaaaagttgtatcgtttcatcatcactttgatctttagaaaggtgattaaaatgaatgttaatttcatcataaaccgaatttgttataaattgtaactctgggttttgataaactagatacatgtgttttgctgcatgtttaatttttgttaaacgctgattttcaaaataaacatcaccttgatatttaatcaattgcataattgattcaagcaaggttgttttaccactaccatttgcccctgtaattgtaatccactcacctaaaccaatttctaaatctgagaatgagaacaacgttgatttaccgcgaataatacgtccatttttaaattgtaataagtgtgagtttgttgttggaaagtcaacacgacttggagcgaattcccatgctcgtggatgccacacaccatattcactgagtaaatgtacatacttctgtaatatgatttcaggacattcatcggcaatgatatttccgttataatccatcaaaatgacgcggtcgacatgattccagatgtgtttaactttatgttcaacgattacaacagtttgatcttcccaaagttcaattagtttagtccataaatcttccgttgcttgaacatctaacattgctgtcggttcatctaaaaacaatgtttttgattgttgaagaatggtttcaacaattgccaatttctgtttcatcccgccacttaaatctttgatatacgtttcaggggtaacatttaaattgaccatatttaaagcattgataattaacgcatccatgtcttcacgtggtacttgtctattttctaaaacgaatgcaagttcttcgtatacttttggcatacaaaactggctatcagggtcttggaaaataacgccacttaatggttcaacgattagttcatcatatttcataggtaattcaattaaattaggaacaataccacttaatacattcagaagtgtacttttaccgcaaccagaaggaccgagtaaaagtactttttctttgtcttgaatagtgatatttaaatgatcgaaaattttacgctgaccacttggatattttaatcgtaaatcacttacttttaacactctgaatgctcctcttataagttgtcgtaatcttctttagcagctggtctaaataattttgttacgcctgtcttatctaaagcttttactaaaaggtaagataggacgccggcgactactgcaccactaattaatctaaatacgatgaataatgttaagttccaacctgcaacctcatttaaataaccatagaaataatcgatcgggaaagccgcgatagctgtacaaaaacctgctaacatagctaccataactgaacgagattgatatttaaaaattgcaaagacaagttcacacgctaaaccttgtatgaaagcgtaaacgattgtcggaatatcgaaacgacccataatgatagtttcgccggcacctgcagcaaattcagccaataaagcaatacctggttttggaataattagatagcagacaatcgctgccatgaaccaaaccccgtttgttaattgttcgaggtgaaggcctgtagcttgcacaccattgtaaacaaaccaccataaattgtaaataactgcgaatactactgaaataagtacggttactagtatttcagatagctttaaaccttttgacatttttacatcctcctaataaaaaaacgcacaaccatccataggaaagttatgcgttcacaatatatattagtaaaacatatgtatagtaacactttcctacgctagttcaagctagatcaggttcaaagggtttgagggcaagcctcatctcagtataaaacacccctagtgtgtgcgatttatttaattaattatactgtaagacgtttataaacttatgtcaataggttatcttcatgaaatttcgtttaattcgatttaaaatttataatattagcattagatttaaattaaagatgtagtagaaatgttagtaattaaagatataaaaatatgtgacatgtaataatattaagttgataagtgaagagggatacttatcaatcatacctctttaacaacagtgaacaacccgtgcataatggcttacgaattattgtttgtaagataaaagtgggatacttgcggtgagcgcaagcataaaagcccctaacaactaaaagttgtaaggggctctaaattaatttagtgtatcttggatatcttgttttgtttgattaatatcttctgttttttcttcttttttatcttttagtttttcttcaacttctttagctttttctgctgcttttttattttgattttcatttgacatgattaattcctcccaaattggataattatttatatataaatcttacccggttgtactttcgttaaacttttctaagtctatagcactatttattcatttatctaaagacaacaacattagattaatatataatgattttgaggtgaacataatgtcttttcttaggaaacacgccgaaattatttttagctatttaatcggtatcgtttcactcttcactggtctcattattttaattaacttgcctttaattaaacaattaaatggtggtaaaaaagttgatacacatgttcataatgtgtgggaatttctgaatgcatttttcagtgaaattattaaagtaatgagtcgatttataggtaatttccctatagttagtgcaattgtgataattatattcggtattttagttatgttgattggtcatacattacttagaactattaagtatgactatgatatttctatctttttcttagttatcggtatcatgtactttattattacacttatattaatgacgcaagtttatggattctttgcagtgattttcattattccatttacaattcatataggatatatcgtctataaagatgaattgaatcaggaaaatgttaaaaatcattacatgtggattattgtaagttatggtataagttatttaattacacaaattgcattgtatggcagaattgatgctaatgaaatagaatcaattgatatcttaagtgtcaatgctttctttataattatgtggttacttggtcaaatggctatttggaatttcttgttcttgcgccgagctttacctttaacaaagcaagaattaggtgaagaggagccagaattatcaagaacaagtaaagggaatgtcacgaatcaaactaaaattcacttgaagcaactccaagataagactacagaatatgcacgtaagacaagaagaagtgtcgatttagataaaattagagctaaaagagataaattcaaaaagaaagttaatgatattatcgatattcaagaggacgatattcctgattggatgagaaaaccgaaatgggttaaaccgatgtatgtcgaactattttgtggtgtcgtcatctttttattcacatttttagaatttaataatcgtaatgcattatttgtatctggtgattggaaattatcacagacacaatatgttattgaatgggttacattactaattctgctagtcattattatcgcatatatcgctacaacgttaactttccacttaaaaggtaagttttattatttacaactatttatggggagcattttattctttaaattgttaacggaatttataaatataatgattcatggacttctactttcagtgttcattacgccaacattactattaatgttattggcaatcatcatttcttattcgttacaattacgagagcgaccataattaaaagcattataaaagtactatctattaaacattttgatgtgtacgctataagttagatatatctctaacttacttagatacaggtcaatgaagtttatggatagtactttttttgtaactagatttgattgattcaggtaatgtgaattaagtattgaaaattgtatacaaagttttagtgcaaataaaatagttgaaaagttatccatttgtaaaatcatgaaaactagtaaatagttgaagtgatatatgtaatttgcgaaacgatatatagtatttcctttgtagaaatttaacatatatcattcgaattactaatttgttaaaatcaacagtaagattagaagtagatgatattgaaatttggcaaacaatttaatctatataaaactacaacgaaacacagaaaggaagttgtcagatgaaaatagcaactctgaacaaaggcaaagaaacaaaatattttaatggatatcctttaattgaagaagaggatatctattcacaagatcatttaaaagaaggagatatttttcaaattgtgactgataaatcacaatatgttgcaacggcttatgttggtcgccaacataaaggattaggttgggttcaaacatacgataaagctcaagaaatcaacacagctttctttgtgaaattatttaatactgcattagcagaacgtgattattattttaatatagatggaacaaatgcttttagattatttaatgctgaaggtgatggagttgggggattaacgatcgacaattacgatggtcatttgttgattcaatggtactcaaaaggtatttataaatttaaatatgccattcttgaagcggttagaaaagtatttgattataaatctatatacgaaaaagtaagatttaaagacagcgaatatagtggaggttttgttgaaggcgatgcacctgagtttccaattgttatcgaagaaaacttcacattttacaatgtagaccttgaagatggtttgatgacaggtatctttttagatcaaaaagaagtgcgcaagaaattaagggatcaatatgccaaagaacgccatgttttaaacttatttagttatacaggtgctttttctgtaatagcagcaagtgaggcatcttcaacaacaagtgtagatttggctaatcgttctcgtagtttaactgaagaaaattttggattaaatgctattgatcctaaatctcaatatatttatgtcatggacacttttgatttctataaatatgctgcacgtcatggacatagttatgacacgatcgtgattgatccacctagctttgcacgcaacaaaaaacgtacattttcagtgcaaaaagattatgacaaattaattactggcgccttaaatatcttatcatctgaaggaacattattattatgtacaaacgcaagtgtatatccattaaagcaatttaaaaatactattaaaaagacgcttgaagagaatggcgttgattatgaattaactgaagttatgggattaccaaaagattttaaaacacatccacattataagccatctaaatatttaaaagctgtttttgtaaatattagacattaatttgataaaaaggggtatagtatcttattgagaaaaagaagggtgatgatacaatgggattcaaaaacaatttaacatcaaatttaacaaataaaattggtaattcagtttttaaaatagaaaatgttggcggaaaaggtgcaatgccaacgacgattcaagaattgagagaaagacgcgaacgtgctgaagcaattgtaaagagaaagtctttaatgtcatcaacaatgagcgttgttccaattcctggattagattttggtgttgatttaaaattaatgaaagatattatcgaagatgtaaataaaatatacggattagatcataagcaagttaatagccttggggatgatgtgaaagaaagaattatgtctgcagcggcaattcaaggtagtcaatttattggtaaaagaatttcaagtgcatttttaaaaattgtaattagagatgtagcaaaacgaactgcagctaaacaaacaaaatggtttcctgttgtaggacaagctgtgtctgcatctattagttactattttatgaataaaattggaaaagatcacattcaaaaatgcgaaaatgttattaaaaatgtcatgtaggtgctataatagttttgcaatttgcaaattttactgaaaccggttttaaacgaattgaatttaaagcatggttttggtaaagttaaggtataaaactaagttagtattgtaataatattgaagattctaactatacgaaggagaaatgtaattatggaacaaaattcatatgtaatcatcgacgagactggtattcacgctagaccagcaacaatgttagttcaaacagcttcaaaattcgattctgatatccaattagaatataacggtaaaaaggttaacttaaaatcaatcatgggtgttatgagccttggtgttggtaaagatgctgaaattacaatttatgctgacggtagtgatgaatctgacgccattcaagcaatcagtgacgtcttatcaaaagaaggattgactaaataatcatgtctaaattaattaaaggaattgctgcatctgatggtgttgcaattgctaaagcttatttgttagttgagccagacttaacattcgacaaaaatgaaaaagtcactgatgttgaaggagaagttgctaagttcaataacgctatcgaagcttctaaagttgagttaactaaaattagaaataatgcagaggttcaattaggtgctgataaagctgctatctttgatgcacatttattagttttagatgaccctgaattaattcaaccaattcaagataagattaaaaatgaaaacgctaatgctgctacagcattaacggatgtaacaacacaatttgttacaatttttgaatctatggataacgaatacatgaaagaacgtgcggctgatattcgcgacgtttctaaacgtgtgttatcacatattttaggtatagaattgccaaatccgagtatgattgatgaaagcgttgttattgtagggaatgacttaacgccatctgatactgctcaattaaataaagaattcgtacaaggttttgctacaaacattggcggaagaacaagtcactctgcgattatgagtcgttctttagaaattccagcaattgttggtacaaaatcaattactcaagaagttaaacaaggcgacatgattatcgtagatggattaaatggtgatgtaatcgttaatccaactgaagatgagttaatcgcttatcaagataaacgtgagcgttattttgctgacaagaaagaattacaaaaactacgtgatgctgatactgttacagttgatggtgttcacgcagagcttgctgcaaatattggtacacctaatgatttgccaggtgttattgaaaatggtgcacaaggtatcggcttatatagaactgagtttttatatatgggtcgtgaccaaatgcctacagaagaagagcaatttgaagcttataaagaagtattagaagcaatgaacggtaaacgtgttgttgtacgtactttagatataggtggagataaagaattatcatacttaaacttgcctgaagaaatgaatccattcttaggttaccgtgcgattcgtttatgccttgcgcaacaagatattttcagaccacagctacgtgcattattacgtgcatcagtttatggtaagttaaatatcatgttcccaatggttgcaacaattaacgaatttagagaagctaaagctatattattagaagaaaaagaaaaccttaaaaatgaaggtcatgacatttcagatgatatagaattaggaatcatggtagagatacctgcaacagcagcattagctgatgtctttgctaaagaagtagatttcttcagtatcggtacaaatgatttaattcaatacacattagctgctgaccgtatgtcagagcgtgtatcatatctataccaaccatataacccttcaatcttacgcttagttaaacaagttattgaagcatcacataaagaaggtaaatggacaggtatgtgtggtgaaatggctggagatgaaacagctattccattattacttggtttaggtttagatgagttctctatgagtgcaacgtctattctgaaagcaagaagacaaattaatggtttaagtaaaaatgaaatgactgaacttgctaaccgtgcagtcgactgtgcaacgcaagaagaagttattgaattagttaacaactacgtaaaataattaattctttcgaaagacagaattataaataaacccgaagtattcattgtgagtaattatgaatacttcgggttcttttttatgatttatgttaatttcaatggaatgttgttgctaactaattaaacaactaggtgttattgacaaaatgttgttctttaattaatgttaattaatttaaaaatcgatatttaattatgatagctaaaaatgatgaagttgatttagatgaaaattaatcttggatatttaatactttgttgatttcatcaagatcaacatggtacattggattgccactcaacaaaataaacggagttgaaaaagcatcaaaatctatcatttcgtttcgatattgttgattgttgatatttctctcttcaaaatcaatttgatgctcatttagataattttttacaaatgtacaaggtggacaatcattctgcgtataaacgattatttctgacatgtatcatgctccttcgtgctttattctaatgtaatatacacaattatacattgaaattcaaatttgtgaacacattgtgaactgacataaattatacacaatttcatagcgcataatgtttcaaaaatatgtattatagcaattataattaagttcattgtgttgtcatcaaaaaaagaaaaaggtgatgtttttaaatggatacagttgaaatcagtcggtttttgacagctatgactttagcagttcatatcatttttgcaacgattggtgttggtatgcctttaatgttcgcaattgcagaatttttaggtattcgcaaaaatgatcttcaatatatagctatggccaaaagatgggctaaagcttatacaattactgtagcagtgggagttgttacaggtacaattataggacttcaattatcattgatttggcctacatttatggaaatgggtggacacgttattgcacttccattatttatggaaacatttgcgttcttctttgaagctattttcttaagtatatatttatatacttgggatcgttttaaaaataaatggacacatttcttaattagtataccagtaattattggtggctctttctcagcattcttcattacttcagtgaattcatttatgaatacgcctgcaggttttgagttgaagaatggaaagatggtcaatgttcaacctatagaagcgatgtttaacccatcgtttatagttcgatcatttcacgtaattactacagccggtatgacgatggcatttgttattgcatcaatagcagcttttaaattattgcgtaatcgtcaacctaaagatactgtctaccataagaaagctttgaaaatgtctatgatagttggattcttttcaacattactttctatgttggcaggggatttatctgcaaaatttttgcataaattccaacctgaaaaattagcagcttatgaatggcatttcgatacatcttcccatgccaaattattattatttggtgtgttagatgaaaagactcagcaagttaaaggtgcgattgaattacctggactattgagtttcttagcagataatagtgtcaaaactaaagtgcaagggttaaatgattttccgaaaagtttacatccgcctatgattgtccattatttctttgatttaatggtaacgatgggaattttatgttttgtcatttcaggtgtttatgtcttaactttaatgtttaaaaagcttagaaagttttctactcataaatggatgctttatggaatattattaacaggaccagcttcaatgctagctatagaatttggatggttcttaacagagatgggtagacagccttggattgttcgtggttatatgcgcgtggcagaagcagcaacacaagcaggcggaataaccttcgttacaattttatttggcatattgtacatcattttaatgtatacatgtgcatacgtattaattcgtatgtttaaaaataaaccggcgtatgaagatgtaaatcgcttagccaagaagcaaggaggagaaatagaaaaatgatttatgcatttataggtataacagtgttatggttgtttttattttgctacatcattattgcttctatagattttggggcaggtttcttcgcattgcattcaaagttaactggtgatgaaaagaaaattaatcacttaatttcacgttatttgaacccagtttgggaagttacgaatgtattctttgttttctttttcgtaggattcgtaggtttctttccagagtcaatcaaatatttaggcacagtattgttaataccaggttcaatagcactgattatgatatcgttgagaaacagtttttatgcatttgaaaattatggtcaagatacaaaattagcatggatgttcatgtatggagtaagtggattattaattccagcttcattatcaactgctttaactattacagaaggtggctatattaatgttcgaaacaatgttatcgatttagattgggtgcagttactattaagcccatttgcttggtctgtagtattcttggcaattatttcagttttatatatttcatcagggtttttgacatattatgctaaaaaagcaaatgacgaacctgcatataatttaacaagacaatggcacatatttttagggccaccgatgattatcatttgtttattcgtatttctatcattacgcattcaaaattctgaacatttttattcagctgtttttgactactggtggatgtttgctataagtttcttattctttgcattagcttcattgttaacattctttaagaaaaagcatggtttggcttttgtatttgttattttacaaatgatgttcgcgttctttggctatggaattagtaaattgccataccttttatatccgtttgtaaaaattacagatgcttatgttaatccagaaatgggctggacattagtgattgtctttattttaggtttacttttattacttccatcgttaatattattattaagattatttgttttcgacaaagaatatgttgaaggaaagaaatcataagttgagacgataccccaactttcatttacttgcattgctgcatttagataatttagttggggtactcatttataataattttaaatttatattttcaatgaattgatgaaaatcatttaatggagggcgagtatgggcaaagaatatgtagtcatcggtctaggtcgttttggaggtagtatcgttcgtgagttgaatgcattagacatggatgtaatggccatcgaccatgatgaaaatagagtgaatgaatatagtgatattgctactcatgcggttgttgcagacacaacagatgaagcagttatgaaaagtttaggtatccgtaactttgatcatgtcattgtggcaattggtgaaaatattcaatcaagtacgttgacgactttaattttaaaagagttaggtgtaaaaaaagtaactgctaaagcacaaaatgattatcatgcaaagattttaaataaaattggagcagatacggttgtgcaccctgagcgtgatatgggtagacgtattgcgcataatgttgcgagtgcaagtgtacttgattatcttgagttggcagacgagcattctattgtagaattgaaagcaactgaaaagatggcggggcagtctatcattgatttagatataagagcacaatatggaattaatattattgcaattaaacgaggcaaagagttcatcatttcaccaaatccaaatattaatttagaaataggtgatattttaattatgattggacatgataatggtttaaatcgctttgaaaaaaatattgcgacgagataatcgggagtgggacagatatgatattttctcaaaatttatttcgtcgtcccacccccaacttgcattgtctgtagaaattgggaatacaatttctctttgttggggcccacaccccaacttgcacattatcgtaagctgacttttcgtcagcttctttgttggggcccacaccccaacttgcacattatcgtaagctgacttttcgtcagcttatttgttggggcccctgactagaattgaaaaaagcttgttacaagcgcattttcgttcagtcaactactgccaatataactttgtagagcattgaacattgatttatgtctcaagctcatcatatataaagaaaaagctactaacaatgtgtggtgagtttaattaaaacttcacttcaaagttagtagctttttgattatttattgtttgattctttttgttcatttaccttcataatgactggtaaaatcattggttttctagctgttttttcaaataaataaggttgtaatgtttcaatgatagaagatttaatctgatgccattgaatatctttattttgatttaacttactaataacatcagttttgattttgcgttgtgcatcataaattaattgtcctgattctctcatatatacaaatcctcgagaaataatgtctggaccagaaagtaatttatttgtattaaaatcaatactaacaacaacgataactaaaccttcttcagataatagcttacggtctcttattacaacattaccaatatcaccgataccactaccatcaacaagtacattaccagatggaatgcgaccagctttacgtgctgaatcgtgtgttaaagctaagacatctccgatatcaaagatgaagacattatcttcttcaacgccgcattcaacaccagtctcaccatgtgcttttaacatacggtattcaccatgaattggtaagaaatatttcggcttgattaatcgaagcattaattgttgatcaccttgagaaccatgccctgaagtatggatgttagaaatcttgctgtggataacatctgcaccagctttatacaaggaattaatcgttctgttaatactttttgtattacctgggataggtgatgaactaaatacaacggtatcttcaggtataattttaatttgcttatgcgtaccattagcaattctagataatgctgccattggttcaccttgagaaccagtacatagtatcaataactcatgcttcggtacggtattaattttattaggttcaataaatgtttcaggtggtgctttaatataaccaagttccataccgattttaatattgttttccatcgaacgaccgaacgtaacaattttacggttatttttgatagcagcttcaactgcttgttgaactcggtaaatattagaagcgaaggtagcgaatataatacgacctttacaattacggaagatcttatctacgttttgaccaacttcacgttcgcttaaagtaaaatcaggcacaagtgaatttgttgagtctgaaagtaaacatagaacgccttcttcgcctaattgagccattttagcaatgtttgctggtttgcctacaggtgtaaaatcaaatttaaagtcaccggtatgaactacttttccttcaggtgtatctacgatgacgccataagtttcaggaatactatgcgtagttaagtagaaagaaatcgtaaagtgcttagatttaatcacactgtcctcattgatttcatttagtttagcagtacgtaataaatgatgttcttcaagtttattacggattaaacctaatgctaaaggaccaccataaataggtatattaagttgttttaataggaagggcacaccgcctatatggtcttcgtgaccatgtgttataaataggccaacaattttatcttggttttgaactagatatgtgtagtcaggtataacataatcaatccctaataagttatcatcagggaatttgatacctgcatcgataatgacaatttcgtctttatactcaactgcataagtatttttaccgatttcacctagacctccaagtgcatatacacctacttcatttggatgtaattgtttcattatttagcaatctccacattaaagtgttctgagttttctttttcgtaatctaaatgtgcgccctctaatttagtgataaattcaatattaaaattacgatctttcaagtaacgacgtacttgttcttctgtttgagcttcaacataaagtgattgtgtattttcacgcacaattacctcgtctctgttatgttgataaaaaactttaaatactgccatgttaaaaattcctcctaagaatgtttgtttaatttattgttaaccctagtaaaatcgtattggagtatatatcgataaattcattccaatcatctctataatgtaacttaataacgattcggttaataactaggttcatcatgtcgttcattttaaaaaattagtgaaataacactaaaatttcagttaaatcttattttacatgatgaatgataataaataaagcagtttatctcactagaaatctaagtatttcgaataaatgtgtagttctgtttattaaaataaatgtagagattataaattaatgttaagaaagaattaaaggattttatatgaaacgataaagtttaaatgaggggataaaaagtttggtagaaaggtgaatatatttaactgttgtctatttgaaaaagttgtacaagaaaaagcttaggacatcatatttatcctaagctttgatagttagtaaaaatgtgttttaaacttctacagcatctgtatgtggttgtaatgggtgatctttgtcaatgtgatcatagaacattacaccatttaaatggtcaatttcatgttggaaaacaattgctggatatccttttagacgtaattgtatatcattaccttcgatgtctttggctttaattgtaattctattatggcgatgaactagaccagcaacattatcatcgacactaaggcaaccttcaccagttggtaaataggcttcttgaacgctatgacttacaattttggggttcacaagcatatagtcataagatttgccactgccatcatctggtattaaaacagcaatcatacgtttagaaatattgatttgaggagcagccaaaccaacacctgaacgtaaaccgtatcgtttcgcgatttcctcatcttgactatttactaaaaactctctcatggcgattaatgtttctttttcttctttagttaatggtaattctagctcagctgctttttgacgcaaagttggatgaccatctctaatgatgtctttcattgttaacatatattgcaccttccttattttaatttgttttagttgaatgacagtaaaaaggttgttaagatactcatacatttttatgtgtaaatatgtacaaagttaaccaactactgccaatgtttattttagatagtatatgtaaattttcagatatgctaattgcttaaaaaaatgattaaagtgttgatttcaagcaatgatactttagaaatttatttatcatcttgactttaaaaattatattataaatgacgtaactgtcaacagatatacttagtaatgaagatgtataaagtaattgtttaaaattgatttccaagcagattttatttatcatttaatttaaatagcaagtggaggtacaagtaatgaaatttggaaaaacaatcgcagtagtattagcatctagtgtcttgcttgcaggatgtactacggataaaaaagaaattaaggcatatttaaagcaagtggataaaattaaagacgatgaagaaccaattaaaactgttggtaagaaaattgctgaattagatgagaaaaagaaaaaattaactgaagatgtcaatagtaaagatacagcagttcgcggtaaagcagtaaaagacttaattaaaaatgccgatgatcgtctaaaggaatttgaaaaagaagaagacgcaattaagaagtctgaacaagactttaagaaagcaaaaagtcacgttgataatattgataatgatgttaaacgtaaagaagtaaaacaattagatgatgtattaaaagaaaaatataagttgcacagtgattacgcgaaagcatataaaaaggctgtaaactcagaaaaaacattatttaaatatttaaatcaaaatgatgcgacacaacaaggtgttaatgaaaaatcaaaagcaatagaacagaactataaaaagttaaaagaagtatcagataagtatacgaaagtactaaataaggttggtaaagaaaagcaagacgttgatcaatttaaataattaatatgatacagatggtaggaaacaactaatacagttcctgttatctgtatctttttttattaaaacagaactttttcaaatggtttaacagtcccatttatttgtggtacaattagtaaggataaaatgaatttctatacaattatgggaaaggtatggtgaattgaatggctcctaagttacaagcccaattcgatgcagtaaaagttttaaatgatactcaatcgaaatttgaaatggttcaaattttggatgagaatggtaacgtcgtaaatgaagacttagtacctgatcttacggatgaacaattagtagaattaatggaaagaatggtatggactcgtatccttgatcaacgttctatctcattaaacagacaaggacgtttaggtttctatgcaccaactgctggtcaagaagcatcacaattagcgtcacaatacgctttagaaaaagaagattacattttaccaggatacagagatgttcctcaaattatttggcatggtttaccattaactgaagctttcttattctcaagaggtcacttcaaagggaatcaattccctgaaggtgttaatgcattaagcccacaaattattatcggtgcacaatacattcaaactgctggcgttgcatttgcacttaaaaaacgtggtaaaaatgcagttgcaatcacttacactggtgacggtggttcttcacaaggtgatttctacgaaggtattaactttgcagcagcttataaagcacctgcaattttcgttattcaaaacaataactatgcaatttcaacaccaagaagcaagcaaactgctgctgaaacattagctcaaaaagcaattgctgtaggtattcctggtatccaagttgatggtatggatgcgttagctgtatatcaagcaactaaagaagcacgtgaccgcgctgttgcaggtgaaggtccaacattaattgaaactatgacatatcgttacggtcctcatacaatggctggtgacgatccaactcgttacagaacttcagacgaagatgctgaatgggagaaaaaagacccattagtgcgtttccgtaaattccttgaaaacaaaggtttatggaatgaaaacaaagaaaatgaagttattgaacgtgcaaaagctgatattaaagcagcaattaaagaggctgataacactgaaaaacaaactgttacttctctaatggaaattatgtatgaagatatgcctcaaaacttagcagaacaatatgaaatttacaaagagaaggagtcgaagtaagccatggcacaaatgacaatggttcaagcgattaatgatgcgcttaaaactgaacttaaaaatgaccaagatgttttaatttttggtgaagacgttggtgttaacggcggtgttttccgtgttactgaaggactacaaaaagaatttggtgaagatagagtattcgatacacctttagctgaatcaggtattggtggtttagcaatgggtcttgcagttgaaggattccgtccggttatggaagtacaattcttaggtttcgtatttgaagtatttgatgcgattgctggacaaattgcacgtactcgtttccgttcaggcggtactaaaactgcacctgtaacaattcgtagcccatttggtggtggcgtacacacacctgaattgcacgcagacaacttagaaggtattttagctcaatctccaggtctaaaggttgttattccttcaggcccatacgatgcgaaaggtttattaatttcttctattagaagtaatgacccagtcgtatacttagagcatatgaaattgtatcgttcattccgtgaagaagtacctgaagaagaatatacaattgacattggtaaggctaatgtgaaaaaagaaggtaatgacatttcaatcatcacatacggtgcaatggttcaagaatcaatgaaagctgcagaagaacttgaaaaagatggttattctgttgaagtaattgacttacgtactgttcaaccaatcgatgttgacacaattgtagcttcagttgaaaaaactggtcgtgcagttgtagttcaagaagctcaacgtcaagctggtgttggtgcagcagttgtagctgaattaagtgaacgtgcaatcctttcattagaagcacctattggaagagttgcagcagcagatacaatttatccattcactcaagctgaaaatgtttggttaccaaacaaaaatgacatcatcgaaaaagcaaaagaaactttagaattttaatacattttaaaagttaacgaagttagcgtattttagtctcattgattaaaatgaaatgtttaatttacgaaatcttaggagggcaaaaacgtggcatttgaatttagattacccgatatcggggaaggtatccacgaaggtgaaattgtaaaatggtttgttaaagctggagatactattgaagaagacgatgttttagctgaggtacaaaacgataaatcagtagtagaaatcccatcaccagtatctggtactgttgaagaagttatggtagaagaaggtacagtagctgtagttggtgacgttattgttaaaatcgatgcacctgatgcagaagatatgcaatttaaaggtcatgatgatgattcatcatctaaagaagaacctgcgaaagaggaagcgccagcagagcaaacacctgtagctactcaaactgaagaagtagatgaaaacagaactgttaaagcaatgccttcagtacgtaaatacgcacgtgaaaaaggtgttaacattaaagcagtttcaggatctggtaaaaatggtcgtattacaaaagaagatgtagatgcatacttaaatggtggtgcaccaacagcttcaaatgaatcagctgcttcagcttcaaatgaagaagttgctgaaactcctgcagcacctgcagcagtatcattagaaggcgacttcccagaaacaactgaaaaaatccctgctatgcgtagagcaattgcgaaagcaatggttaactctaagcatactgcacctcatgtaacattaatggatgaaattgatgttcaagcattatgggatcaccgtaagaaatttaaagaaatcgcagctgaacaaggtactaagttaacgttcttaccatatgttgttaaagcacttgtttctgcattgaaaaaatacccagcacttaatacttcattcaatgaagaagctggtgaaattgtgcataaacattactggaatatcggtattgcggcggacactgatagaggtttattagtacctgtagtgaaacatgctgaccgtaaatctattttccaaatttctgatgaaattaacgaattagctgttaaagcacgtgatggtaaattaacagccgatgaaatgaaaggtgcaacatgcacaatcagtaatatcggttcagctggtggacaatggttcactccagttatcaatcacccagaagtagcaatcttaggaattggccgtattgctcaaaaacctatcgttaaagatggagaaattgttgcagcaccagtattagcattatcattaagctttgaccacagacaaattgatggtgcaactggccaaaatgcaatgaatcacattaaacgtttattaaataatccagaattattattaatggaggggtaaaacatggtagttggagattttccaattgaaacagatactatagtaatcggagcaggtcctggtggatacgttgctgcaatccgtgcagctcaattaggacaaaaagtaacaatcgttgagaaaggtaatcttggtggtgtttgcttaaacgtaggatgtattccttcaaaagcattactacatgcttctcaccgttttgttgaagcacaacattctgaaaacttaggtgttattgctgaaagtgtttctttaaacttccaaaaagttcaagaattcaaatcatcagttgttaataaattaactggtggtgttgaaggcttacttaaaggtaacaaagtaaacatcgttaaaggtgaagcatatttcgtagataacaatagcttacgtgttatggacgaaaagagcgcacaaacatacaactttaaaaatgcaatcattgcaacaggttcaagaccaattgaaattcctaatttcaaattcggtaaacgtgttatcgactcaacaggtgctttaaacttacaagaagtaccaggtaaattagttgtagttggtggaggatatattggatcagaattaggtacagcatttgctaactttggttcagaagtaacaatccttgaaggtgctaaagatatcttaggtggcttcgaaaaacaaatgacacaacctgttaaaaaaggtatgaaagaaaaaggtgttgaaatcgttactgaagctatggctaaatcagctgaagaaacagataacggagttaaagtcacttatgaagctaaaggcgaagagaaaacaatcgaagctgattatgtattagtaactgtaggtcgtcgtccaaacacagacgaattaggcctagaagaattaggtgttaaattcgctgaccgtggattattagaagttgataaacaaagccgtacgtctatcagcaatatctatgcaattggtgatatcgttccaggtttaccacttgctcacaaagctagctatgaagctaaagttgctgctgaagcaattgatggtcaagctgctgaagttgattacattggtatgccagcagtatgctttactgaacctgaattagctacagttggttattcagaagcgcaagctaaagaagaaggtttagcaattaaagcttctaaattcccatatgcagcaaatggtcgtgcattatcattagacgatactaacggatttgttaaacttattacacttaaagaagatgatactttaatcggtgctcaagtagttggtactggtgcatcagatattatctctgaattaggtttagcaattgaagctggtatgaatgctgaagatatcgcattaacaatccatgcacatccaacattaggtgagatgactatggaagcagctgaaaaagctatcggatacccaatccatacaatgtaataactgattatctataaagattcagtcattaaaaagctgtagcatatgctacggcttttttgttttaggtaaagtagtgtaaggaaattgatttgagatatcgttaacatgtgacatgcatgttatactagcgatgctaacaaaagaattgaaatggagggttcaacaatggaatatgagtatccaattgatttagactggagtaatgaagagatgatttcagtgataaatttctttaatcatgtagagaagtattatgaatccggcgtgacggcaggagactttatggatgcatataaaagatttaaagaaattgtgcctgctaaagcagaggaaaaacaaatttttaatactttcgaaaaaagtagtggctataatagttacaaagcagttcaagatgtaaaaactcactctgaagaacaaagagtaacagctaaaaaataattcgttcgaaattaacacaatttaataggattttttctttaaaactattgctaataaagctatattttgatacctttatcaagtgttaaacaaaatgtttgataaaagtaaacttaatatagcttttttaggtggaaaaataaatgaacataggtaataaaattaaaaatcttagaagaattaaaaatttaacgcaagaagaacttgctgaacgtacagacttatcgaaaggctacatttcacaaatagaaagtgaacatgcgtcgccaagtatggaaactttcttaaatattatagaggtgttaggaacgacgccaagtgaattttttaaagacagtgaaaatgaaaaagtattatacaagaaggaagaacaagttatttatgatgagtatgatgaaggttatatattaaattggttagtatcaaagtctaatgaatatgatatggaaccattaatactaacattaaagcctggcgcatcatataaaaactttaatccatcagagtctgatacgtttatttattgtatgtcaggtcagataacacttaatttaggcaaagagatatatcaagcacaagaagaagacgttttgtattttaaagcacgagataatcatcgtttgtcaaatgaatcaaacaatgaaacacgaatacttattgtagcgacagcttcatatttataggggggatcttatttggaaccgttattatcattaaaatcagttagtaaaagctatgatgatcttaatatcttagatgacatagatattgatattgaatcaggatacttttatacattattaggtccttcaggttgtggtaaaacaacaattttaaaattaattgcagggtttgaatatcctgatagtggtgaagtgatttatcaaaacaaaccaattggtaatttaccaccaaataaacgtaaagtgaatacagtctttcaagattatgcattatttccacacttaaacgtctatgataatatcgctttcggtttgaaattaaaaaaattatcaaaaaccgaaattgatcaaaaagtaactgaggcattaaaattagttaagctttcaggttatgaaaaaagaaatattaatgaaatgagtggcggacaaaagcaacgtgttgcaattgcacgtgctatcgtaaatgaaccagaaatattattgttagatgaatctttatccgcattagatttgaaattgcgtactgatatgcaatatgaattaagggaattgcaatctagattaggtattacatttatatttgtaacacatgatcaagaagaagcgttagcactaagtgactttctttttgtattaaaagatgggaaaattcaacaatttggtacaccaacagatatatatgacgaaccagtgaatcgatttgtagctgattttattggagaatctaatattgttgaagggcgcatggttagagattatgtcgtgaatatttatgggcaagatttcgaatgtgtcgatatgggtattcctgaaaataaaaaagtagaagtcgttattcgaccagaagatatatcattaatcaaagcagaagaaggattatttaaagcaactgttgattctatgttatttagaggggtccactatgaaatatgttgtatagacaataaaggttatgaatgggtaatacaaacgactaaaaaagctgaagtaggcagtgaagttggtctttattttgatcctgaagccattcatattatggttcctggagaaacagaagaagagtttgataaacgtattgaaagctatgaggaagtagacaatgcgtaatactaataaatttctcttaatcccgtatttattatggatggttatatttattattgtaccagttgtattactcatttatttttcatttttagatatcaatggacattttagtttcacgaattatcaacaaatttttactacaaaatatttaaaaatgtttgcatattcaattttatatgccgctttaataacaattattacgttggctatcagttatccagctgcctattatattactcgctcgaaatttcaaaatatcttattaatgataatgattattccaacatggataaatttattgttaaagacatatgcttttataggtttattaagtcacgatggcgtgattaatcaatttttccacttatttaatttaccatcattcaatttattatttacaactggtgcgtttttagtagtggcaagttatatttatataccatttatgattttacctatatttaatagcatgaaagcaattcctaataatttattgcaggcctcaagtgatttaggtgctagtcctttctatacttttagaaaagtaatcatgccgttaacaaaagaaggtgttatgactgggattcaagtaacctttattccatcactttcattatttatgattacaagattaattgcaggtaataaagtcataaatataggtacggcaatagaggagcaatttttaacaattcaaaattatggtatgggatcaactatagctttattcttaattgtatttatggcattcattttaatcattacaaaatcatctaatgggagagggtgagtcatatgaaatggtatggaaaactgtatatcgggatacttttagcgattttatacatcccaatattctttttaatgttttattcattcaattcggctggtaatatgattcactttgaacattttacattagagcattatcaatcattatttcaaaatgatcatttaatgtcggtcatttttaatacgatagctgtagcacttttagcagcctcaatttctacagttattggtacatttggtgccattgctatttattatttaagaaataaaaagtttaaagtaactttactaacattgaataatgtcttgatggtatcatccgacgttgtcataggcgcatcattcttaattatgtttacaacgattggccattttactggtcttggtttaggattttggacagttctaatatctcatattgcattttgcatacctatagttgtgattatcgtcttaccacaactgtatgaaatgaataataatatgttaaatgctgcaagagatttaggagcgactgaaccacaattattaagcaacattattattcctaatattttaccttctattataggagggttctttatggctttaacttattcactagacgatttcacagtaagtttcttcgttactggtaatggctttagtgtgttatcagttgaagtttatgctatggcgagaaaaggaattagtatggaaattaatgcgatttcaacattattgtttgctgttattgtattaggaatactaggatattatttgattcaatacgtgataaataagaaaaaactaatcaagcgaggtgtaaaataatgaaacgttttttacaactcattataggtgcattagttgtgggtatgctttgtcttactttaagtcattggtttaaatctaaagaacaagtgcatacaaatcaaaaaatttacgtatacaattggggcgaatatattgatccagagttaattaagaaatttgaaaaagaaacgggcatacaggtcgtttatgaaactttcgattcaaacgaagcgatggaagccaaaattcgcaatggcggtacacattatgatgttgcttttcctagtgaatatacagttcaaaaattgaaaagagatcatttattgttaccaatagatcataataaagtacctaatattaaaaatttagattcagattatatgaatatgtcatttgataaaggcaataaatattctttaccttatttctttggaactgtaggtattttatataataaagaaaagtatccaaatgaatcatttgatagttggaagtcattgtataatcctaaatttaaaaaccaaattttactagttgacggtgctagagagattataggcatgagtttgaataaacttgggtataatcttaatgaccgtaattcgcaccatttaaaagaagcagagcgagatttaactaaattagcaccacaagtaagaggtgtcgtaggtgatgaaattaccatgatgcttgaacaaaatgaaggtaacattgcggttgtttggagtggtgttgcagcacctctagtgcaagaaggggataaatataactatgttattcctaaagaaggatcgaatttatggttcgacaatatggtaattccgaaaacggcacaaaataaagagggtgcatataaatttatgaattttttattagatgctaaaaataacaagcaaaatactgaattcgtaggctatgcaacgccaaacaaggctgctcgacaattgttgcctaaagagattaaagacgaccatcgtttctatcctacaaaggaagaacaaaaacgacttgaagtgtataaagatttaggacaagaagttttaagcgaatataacgaaaactttttgaatttcaaaatgtcactaaaataaaaacataaatagtagttatttactgtatatttagttataataactggataagtactataaggagttgtaacgaatgactggagaacaatttactcaaattaaacgtccagtaagtagattaactgaaaaagttctaggttggctttgttgggttatgttattagtgcttaccgtcattacgatgtttatagcgcttgtttcgtttagtaataacacatcgattgctaatcttgaaaatacattaaacaataatgcatttatccagcaattattagctggtaatggttataatacaacccaatttgttatttggttacaaaatggtatttgggctattattgtatactttattgtgtgtttattgatttcgtttttagctctcatttctatgaatataagaatcttatcaggctttttattcttaatatcagcttttgtaacgattccgttagtactacttatcgttacattaattattccgattttattctttattatcgcgatgatgatgtttattaggaaagataaagttgaattggttggacctcaatattatgaaggttacaacgaaccggtatatgattatcgtgaacctgtgtacgagcgtcaacaaccgaaagatgattattatgatgtgcctaaatatgaaaaagaattggataaatcaaacactgtatatgatcaagaacaggaaagagataaatatgatcaatttcctaaacgtgcagttgaaagtgaatataatcatgatgaacgtattgaggaagaaccatcagtattatccagacaggctaaatacaaacaaaaaagtactgaagaactaggtattgaagatgatggttattatgcagaacctgaagttgatccaaaagaattgaaagcacaacaaaagagagaaaaagctgaaattaaagctaagaaaaaagaaaaacgtaaagcttataaccaacgaatgaaagaacgtaggaaaaatcaacctagcgcagttagtcaacgtcgaatgaattttgaagagcgacgtcaaatttacaacaatgatatttctgaagaacgcaattcaagtgaagttaaggacaaaaaagagcaagaataaatattgatggtacccagattagtaagtagaggtcttttgcttattaatctgggtttttatatgaggttaattatcgataacgtttaattaaagtgtttaggtgtcataattttaaatgacgatttctctttaccatacagctaaattaccatcaatctgaattcagatgtttattataaaaattagataaaaaatatgttaatatacaagtaaattaatgtgcgtatatctattggctcgtagtatacttattaaaatattaaacaaagaaaggattttaagatgaatagaaaacctgaattaatcatggcttggattgcaaatagtattagtattatttatttattagttatggggctatcctatttttctttaaaaactggtaatgcatcacaacgtgaagaattagcgaagcaattatctcagaacggtggcaaagtttctttagatatgcttcagacaacaataggtgcattagcaattattttattaatttcaacactttatggtatatttgcgacaatttgtattaaagggcgtagaaaattatcggttatactttttgttatcacgataattgtaagtttgatggcttttaatttaattgcaattgtcttatggattatcgtgatgattatgttgatttctaaaaaagaatcaaaagaaactacacataaggacgatgagtatatttatcattaatatgttcatagcaaaagaaaaaccattaatatgttaagttgttaattattagatacaactaacattttaatggttttatttttaaccttgtagttcttggaatgtttgaacgattaaatagatatttaaaatacttagaataataataagtgtccatgaaatgatattaacccatgttttattatagaaaggtcccatcaagtctttattactagtagctaattgtaatggaattaaacagaacggcagagcaatacttaagaatacttgagagaatacaagtagctgctcaattttagctgcattacccttaaaaatgattaaacatacgataacaggaatgacagcaagggaacgtgtaattaaacgtcttaaccaatttggtatgtgtaatcttaaaaatccttccattacaatttgtcctgctaaagtaccagtaatcgttgaattttgacctgacgctaataatgcaactgcaaataatgtactcatgattgcacccattgttgcacccagtacaggttcagtttttaaggcatgatataaatcatagaaaccacctaaatcgtcagcgtttgagttgaaaaatagtgatgctcctaacactaataataagcaattgactacaaatgcgattgatagctgaatgttcgaatctatcgtagcaaatttaatcgcttgcgccttttcttcattattatgtcttgagtatgttctagattgtacaattgatgaatgtaagtacaaattatgaggcataattgttgcaccaataatacctaatgcaatatagagaatgccgttatttgtaatgatttcactatgtggtataaatccatataacacagcgttcaactgtggtgatgaaatatagacttcaaatataaagatgaataacactgtgaaaattaatgtaccaacaatagcttcaatttttctaaaaccatatttcattataaatagtagtaaaaatacatcaagtacagttattagtgcaccgacgattaaaggtatgttaaataggagattgagagcaatagcactaccaataacttcagcaatatctgtggcgataattgctagttctgcaataatccaaaagataatagcaataggtcttgataaataatgtcgtgtcatttgagctaagtccatacctgttgctattcctaatctcactgtcatgctttgaagtaacattgctgataaacttgaaataagaattacgaatagcaaagtatagccatattgcgcgccaccttgcattgatgttatccagtttccgggatccatgtaaccaacagcgactaataacccaggaccaagaaatgataaaaatttctgtttatttgaactgcgatgatcgaatttaattgtattgtttatttcgtctaaacttaattgttcatttgttgaatgtcgtttattattcattttgactcacctctacttcttatggacaatataataacctaataaaatgtttaggtcaacctaaatttattttatttttttaaaaagtatgaattattattttgaatgttcgatttaatggtaagaaaaaagagcacgaaatcatggctgtgattacgtgctctattatttaaacaaagttatttatgcagaataaaatggtaagaactgatcgaaggtttcttctaaaaatgcaataaatgctttgtcactttttaatcttttatcttgtggtgtgattgcacgcgctataaagaattcaccttttttcacattgatggctctttgtatcgcttcttttaaatcatcatccgttaaatctttaataaatggtttatcaggtttcatatgatctaagcaaacacgataatcatcaggtaattgttgaatagctttgaattttctttcaaaaacttttgcacgtgttgctttatcttttgcttcatgcatgattccaaacataacaaacagttgatcttcaaacataccaatttggaaatgaggtaacattttataacctcgtttgcttgtagcaaaagcaacccatgtatctttaggaggattcacacttcttctagcatgttttgctacgtgaggataaaatgtttcaccggtttgacttgtaaagaagtcactaaaatatcctcctaattcatggagttgtggtcgtatgtattcgtttaaagcttccattcgtgcgtctaagccttctacgttgaacgctttgaaatctttaggtttaaatgtatattttgtcatagagtacctcctgtatagtgtttaaaaatattgtagcatatgttttatcaattgcggattaagacgctctcattaaaattagtattttcatttttatcataagaagttatttttataaaatgttgatgtataataaagatgttaggagatgatgttatggcactttatggatttgcccaaggacttattcaagaagcaggaattagaattaaacaattgatggagcaaaatttaacaattgaaacaaagtcaaatccgaatgaccttgttacaaatgtagataaagcaacagaagattttatttttgatacaattttagaaacatatcccaatcatcaagtattaggtgaagaagggcatggtcatgacatcgatacttccaaaggtacggtatgggttgttgacccaatagacggtacattgaattttgttcatcaacaagaaaatttcgcgatttcaattggtatttatatcgatggtaaaccttatgcaggatttgtatatgatgtgatggctgatgtcttatatcatgcaaaagtcggtgaaggtgcatttcgaggcaaccagcgattagaaccattacgcagttcaaatctaagacaaagcattattgggatcaatccgaattggttgacgaaacctgtgctaggagagatttttaaagaaattgttaatgattctagaagtgcaagggcatatggtagtgcagcgcttgaaattgtttcagttgctacaggtaatttagaagcatatatgacgccaagacttcaaccatgggattttgctggcggactagtcattttaaatgaggtggacggtcaagcttctaatttattaggtgaaccgctaacaattggtggcccaaactcagttttagttggtaatcgtgctgttcatagagagatcctcgatgtatatttagagccacatcgcgatgcgttaatacaattacatgaacaacgatttaaaagaaaatcaaaataattaccaaaagcgtaatatgtagtcctaacaattaggtgacatattacgtttttatatcttaaataataaaaacacgcgccaatataaaaccatttaaatgttcatcatgaacatgtgtggtctttaatcaacgcgtgttattgtcgatataacttatagccaatcgttttctcgatattttttcttcgtagtaaatccaattccaaaggttgcaacgagtaatataaatgttaaaatcatcattggtacatttgatgcaccaacagcaaaactaaataatactaagaaaataacagctaatatagaaaatacccaaaagatatttttagattttttttgtttcatcctatccccaccttttgcttatcttttctcaattatatgatataataaaaaagttgtaattaaaagtgggattttacttaagaaagaaggaaactatttatatgactaataaaagagaagatgtccgcaatatagcaattattgctcacgttgaccatggtaaaacaactttagtagatgagttgttaaaacaatctggtatattcagagaaaatgaacatgtcgatgaacgtgcaatggactctaacgatatcgaaagagagcgtggaattacgattctagccaaaaatacggctgttgattataaaggtacacgtattaatattttggatacaccaggacatgcagactttggtggagaagtagaacgtattatgaaaatggttgatggggttgtcttagtagtagatgcgtatgaaggtacaatgcctcaaacacgttttgtacttaaaaaagcgctagaacaaaatctgaaacctgttgttgttgttaataaaattgataaaccatcagcacgtccagagggtgttgtagatgaagttttagatttatttattgaattagaagcaaacgatgaacaattagaattccctgttgtttatgcttcagcagtaaatggtacagctagcttagatcctgaaaaacaagatgataatttacaatcattatatgaaacaattattgattatgtaccagctccaattgataacagtgatgagccattacaattccaagtagcattgttggactacaatgattatgttggacgtattggtattggtcgtgtattcagaggtaaaatgcgtgtcggagataatgtatcactaattaaattagacggtacagtgaaaaacttccgagtaactaaaatctttggttactttggattaaaacgtttagaaattgaagaagcacaagctggagatttaattgctgtttcaggtatggaagacattaatgttggtgaaactgtaacaccacatgaccatcaagaagcattgccagttctacgtattgatgagcctactcttgaaatgacatttaaagttaacaattcaccatttgctggccgtgaaggtgactttgtaacagcgcgtcaaattcaagaacgtttaaatcaacaattagaaacagatgtatctttgaaagtatctaacacagattctccagatacatgggtagttgctggtcgaggtgaattgcatttatcaatccttattgaaaatatgcgtcgtgaaggttatgaattacaagtttcaaaaccacaagtaattattaaagaaattgatggtgtaatgtgtgaaccatttgaacgtgtgcaatgtgaagtgccacaagaaaatgcaggtgcggttattgaatcattaggtgcacgtaaaggtgaaatggttgatatgactacaactgataatggacttacacgtttaatctttaatgtaccggctcgtggtatgattggttatacgactgaatttatgtcaatgacaagaggttacggtattattaaccatacatttgaagaatttagaccacgtattaaagcacaaattggcggtcgtcgtaatggtgcgttaatttcaatggatcaaggttctgcaagtacttatgccattttaggacttgaagatagaggtgtaaacttcatggaacctggtactgaagtttatgaaggtatgattgttggtgaacataatcgtgaaaatgatttaactgttaacatcactaaaacaaaacatcaaactaacgtacgttctgcaacgaaagaccaaacacaaacaatgaatagaccacgtattctaacattggaagaagcattacaattcattaatgatgatgaacttgttgaggttacaccagaaagcatacgtttaagaaagaaaattttaaacaaaaatgttcgtgaaaaagaagcaaagcgtattaaacaaatgatgcaagaaaacgaataatttaacatattaaaagagaagctgagcgatgaaagttgcttagcttctcttttggcatataatatttgaaaaagtgtttaaatgctatcagttcctgttgctttcacattttcaaatttctaacttgtttattcagatattaatcgagcggatagtgttgtgcacgttgtttaggggtgtctagtcgacttttacaatcatcgcacataaatgttcgaataggattgtttttaagtcgtttagactcagttgtgcgctcatctataaatacttttgcatcacagataatgcattgcacttgtctcaaattaaatcacctcaatatgagttacatggttgattcgatatgaataaccatcttcttgattgtaaataaaactatctacaccattatcgctgtaaagtcgtttaccgtcttttgcaaattggaaaaataaatagggtaatagatctatcggtatatctaaatgatcatgctcatttgataatcgaatagtagttgcagagtcatgtggttcggaatgtttgaaaaatggtgtcatattaatgacaaatgaaccttctaacatggcacgttttttgtattttatttctgaatttaaagtaggcggattagtttgtccttctaggatagcacgattccattcatgattatcttcaaagtcgattggttttgaaccatcaaatacacctttttctaaatcttcgatgctaacttttctatcatcgaaaatccaagtcgtactatctaatgttataggaaactttacggctcctttaatttgtatcattttcccactccctatcaatgtatatagcattattttaacacaaattgctaacgacacattttaaatctacttgctttttaatatttagtaagataaacttttattaagacttgagaatttatatagagggggagcgtgtcatggcgaaacaaacaacaatgaaaaatgcagctttgaaacaattgactaaagatgctgatgaaatcttgcacctgattaaagttcaactagataatttaacattaccttcatgcccattatatgaagaagtactagatacacaaatgtttggacttcaaaaagaagttgattttgctgttaaattaggtttagttgaccgcgaagatggcaaacaaattatgttacgtcttgagaaagaactttcaaaattacatgaagcttttacacttgtttaaggtttaatatataagcatattaaaacggcgtgagatatcgacaattgagctgcgccgattttatatttatagtttaattactgattaaagtggctgttatgttgtcttcttgatgacatgtcagtcacttttattgggttttagcaattcacgatattaagtaaacaaatattctataaattacctcaagatacctgttaatatttgtgattatgacgatgtcatgtatataataagtaacatggatttttaaaattaaagtataaaacgaaatcatttgaagtataaattgtagaattggatgactgaatatatgaagaattttagaagtattttacggtatattggtaaaacctcaaagtttattgattacccgttattagttacatatattgtattgagtttaattggattagtgatggtatatagtgccagtatggttccagcaactaaaggcacattgactggtggtatcgatgttccaggaacgtatttttacaaccgacaattagcatatgtcataatgagttttataattgtattttttattgcatttttaatgaatgttaaattactgagtaatattaaagtgcaaaaaggtatgattataactatcgtctcgctattattactgacgttagtaatcggtaaagatattaatggttctaaaagttggataaacttaggatttatgaacttacaggcatctgagttattaaaaattgcaatcatattgtatatcccatttatgataagtaaaaaaatgcctagagtattaagtaaaccaaaattaattttaagtcctattgtattagcattaggttgtacgtttttagttttcttacaaaaagacgtagggcaaacattactaatattaattattttagttgcgattattttttattcaggaattggggtaaacaaagtcctaagatttggtataccagcagtactaggattcttagtagtgtttgtcattgcattaatggctggttggttaccaagttatttaactgccagatttagtacgctaacagatccattccaattcgaatcaggaactggataccatatttccaattctttgcttgcgataggtaacggtggcctatttggaaaaggattaggaaatagtgcaatgaaattgggctatttaccagaaccacatacagattttatttttgcaattatttgcgaagaattaggtttaatcggaggattgctagttattactttagagttctttattgtatatcgtgccttccagtttgcaaataaaacatcatcatatttttataaacttgtgtgtgttggtattgccacatactttggaagccaaacgtttgtaaacattggcgggatttcggcaacaattccattaactggtgtaccattgccatttatcagctttggtggatcatcaatgattagtttaagtattgctatgggattacttctgattgtaggtaaacaaatcaaagtagaccagcaacgaaagaaacaacaacaaaaagttgatataagaagacaatttaattaaaaattactagccaatatttagtacgagatgacttctgtcattaagcaatgctaaacattggctatttttatactctttgtcaaattggactgaagagttcaataacggaagttaggcaagcaaacaacgcttaacttcctttttgtttttatattacgagattactcatgattatcaaattttataaacaaaacaacgtataattataactaaattttatgactaaaaatcactaaatgtggtggcgaaattagaatcatgatgataagataaagttatcgctattgataataaatgttgatgttttacaattttatttttaaatttttagagttgtagaaatcgaaaatgtttcacaacaaaaacgtgaactacctgttgttgcataatcatttttgaaattattatttttgaaacggaggttttaattgtctcaagaatgttaaattttgaaaatttgaaacataactatagcaaaacagagcgctttaagataaaattttattatctaattagttagaaaattctaatagtttgaggagtgtatcgctattgaaacaaataaaaaagttacttgttgctaaccgtggagaaattgcaattcgtatattcagagcggcagcagaattagacatcagcacagttgcaatttattcgaatgaagacaaaagttcattacatagatataaagcagatgaatcctatttagttggaagtgatttaggtcctgctgaaagttatttaaatattgagcgtatcattgatgtagcaaaacaagcgaatgtggatgcgattcatcctggctatggatttttaagtgaaaatgaacaatttgcgcgtcgttgtgcagaagaagggattaaatttattggtcctcatttagaacatttagatatgtttggagataaagttaaagctcgtacaacggctatcaaggcagatttaccagttattcctggtacagacggtccaattaaatcatatgaattagcaaaagaatttgcagaagaagctggtttcccgctaatgattaaagccacaagtggtggcggcggtaaaggtatgagaattgttcgtgaagaaagtgaattagaagatgctttccatagagcaaaatcagaagcagaaaagtcatttggtaatagtgaagtttacatagaaagatacattgataatccaaagcatattgaagtacaagttataggtgacgaacatggaaatatcgtacacctatttgaacgtgattgttcagtacaacgtcgtcatcaaaaagttgtagaagttgcaccatcagttggattatcaccaacattacgtcaacgtatttgtgatgctgcaattcaattgatggaaaatattaaatatgtcaatgcaggtactgttgagtttctagtatctggtgacgaattcttctttatagaagttaaccctcgtgtacaagtagagcatacaattacagagatggtaacaggaattgatattgttaagacacaaattttagttgcagcaggtgccgatttatttggtgaagagattaatatgccgcaacaaaaagatattacaacattgggctatgccatccaatgtcgtattacaacagaagatccgttaaatgatttcatgccggatactggaacaatcattgcttatcgttcaagcggtggctttggtgtacgtcttgatgctggagatggtttccaaggtgctgagatatcaccttattatgattcattactcgtaaaattatctacacatgcgatatcatttaaacaagcagaagaaaaaatggtacgttcattacgagaaatgcgtattcgtggtgttaaaactaatattccattcttaattaatgtaatgaagaataaaaagttcacaagtggtgattacacaactaaatttattgaagaaacaccagaacttttcgacattcagccgtctctagatagaggtactaaaacattagaatatataggtaatgtaacaattaatggtttcccaaatgttgagaaacgtccgaaaccagactatgaattagcatcaattccaactgtatcttcaagtaaaattgcttcatttagtggtacaaaacaattgcttgatgaagtaggtccaaaaggtgtagctgaatgggttaaaaagcaggatgatgtcttactaacagatacaacttttagagatgcacatcaatcattattagctacacgagttagaactaaggatatgattaatatcgcatccaaaacagcggatgtatttaaagatggtttctcactagaaatgtggggcggtgctacatttgatgtggcatataatttcttgaaggaaaacccatgggaacgacttgaacgtctacgtaaagctattccaaatgtattattccaaatgttgttacgtgcttcaaacgcagttggttataaaaactatcctgataatgttattcataaattcgtacaagaaagtgctaaagcaggcatagatgtctttagaattttcgattcattaaactgggtagatcaaatgaaagttgccaatgaggcagtacaagaagcgggcaaaatctcagaaggtactatttgttatacaggtgacattttaaatcctgagcggtcaaacatttatactttagagtattatgtcaaactagctaaagagttagaacgtgaaggtttccatattttagcgattaaagatatggcaggcttattaaaacctaaagccgcttacgaattgattggtgagttaaaagcagctgtagatttaccaatccatcttcacactcatgatacaagtggtaatggtttattaacgtacaaacaagcaatagatgctggtgtcgatatcattgatactgctgttgcttcaatgagtggtttaacaagtcagccaagcgctaattcgttatattatgcattaaatggcttcccacgtcaccttagaactgatattgaaggtatggagtcacttagtcattattggtcaactgtacgtacttattattcagactttgaaagtgatatcaaatcaccgaatactgaaatttatcaacatgaaatgcctggtggacagtattcgaatttaagtcaacaagctaaaagtttaggtttaggcgaaagatttgatgaagtcaaagatatgtatcgcagagtgaacttcttatttggtgatatcgtaaaagtaacgccatcgtctaaagtagttggtgatatggcactttatatggttcaaaatgatcttgatgaacaatccgtgattacagatggttataaattagatttcccagaatcagtagtgtcgttcttcaaaggtgaaataggacaacctgtaaatggttttaataaagatttacaagcggttattttaaaaggccaagaagcattaacagctcgtccaggtgaatatctagagccagttgattttgaaaaagtccgtgagttgcttgaagaagagcaacaaggtcctgttacggagcaagatattattagttatgtattatatccaaaagtatatgaacaatatattcaaactagaaatcaatacggaaacttatcgttacttgatacgcctacattcttctttggaatgcgtaatggtgaaacagtagaaatcgaaatcgataaaggtaaacgattaattattaaactagaaacgattagtgaacctgatgaaaatggtaatagaacgatttactatgcgatgaatggtcaagcgagacgtatttacattaaagacgaaaatgtgcatacaaatgcgaacgttaagccaaaagcagataagagtaatccaagtcatatcggtgcgcaaatgccaggttcagtaactgaagtcaaggttagtgtaggtgaaactgtgaaagctaaccagccgttgctaattactgaagctatgaaaatggaaacaacaattcaagcaccatttgacggtgtgattaaacaagtaactgtgaataatggtgatacaattgccacaggcgacttattaattgaaattgagaaagcaacagattaaaatgattaaaataaaacgagattacacaacgattgacgtgtaatctcgtttttacttgtcttagatttgattttaaatattgatataaaaaaaccgaaattttaatgggcgtgccattaaaatttcggtttgcttttttgttattgcttgtcacttcttactgatcgtaacattagcatgataaagtatgttgtcataccaaataaataagtgataaataatgcatggaatagtgcgattatcaagttaacatttgtcataatagacaatgcacctgtgataacttgtaatataacaagtataaatgcagctgtataaccataatgaacagtacggttatttggataatttttaacagcgtgaatataagtaatcataataatcgtaaacactataaaagccatgatacgatgcgtgagttggacccaatcttgttctgaatgtggtacaagatcgtggaatggcaatggccaaccaccatatgctaaacttgcatccgcatgtctcactagtgcaccagtgtaaacaccacaataaatgataattgccattaaccatgttaaacgtcttaatggctttttgatatataattcgtcagcttcatatttttgatctatagagaaaataatcaatgttattaaaaatacagatgagaaactgattaatgatataccaaagtgtaatgctaaaacgtaatcgttttgttgccaaataacagcagcagctccgattaatgcttgcaataataagaatccaacactaatgattgataaaggtttaatttctttaatatagcctatatgtttccatgcagtgataactaaccataagaccattaataaagataaagctgaaacggctctatgacttaactcaataatcgtatcaataggaaagaattctggaatcaacgcaccatgacatagtggccaagaagaaccacaaccatcagctgatccggttttggtaactaaggcaccaccaagttgtacaaatgtcatcattaacgttgctacgacacctaaccattttaaattctttttgccaaacaatttatacaccccatcataaaaaaacgcatcactgagaattagaattaatagccgggtttgagatgatactataaattgacctgagtgtaggatatgaaaagatgggatccaacgcaggaaatatgatttaattttacaagtattgtaagtggacgacataaaaagaccttaatcgtaatgatttttttattgggataattgtgtaatccacgcttactcaaatttgaagcttaaatattaatctcttttagatgcatgattctacttattaaaattttctaacatatacattatagcaataaattaaatgctatttgtgtcacaaaattgacattttctcttgtcgttaatttgtcacaatttaattttattaaacctagtctttttatgcaatctaagatatcataatcttatatgaacaaatttaaggagggggattatgagcaaagagcatactttgtcacaaaatattagcagagttaacttcaaagaattgcaacagataattaaaatgggacttgttcaaggtaacttaattccagcttttgcgggcgcatggctagcagttgtaatgacaaatcattccttcttatcatcaatacctcaaattttattaatgctattaggatctactttaattatgggtggcgcatgtgcgttaaataattattacgaccaagatattgatcgtattatgcctagtaaacaaaatagaccaactgtaaataatagaattacagatcaaaatttattacttttaagttttggtatgatgttagttggagaaatttgtttgtttttattgaatataccatcaggcgtacttggtcttatggggattgtaggttatgtgtcttattactcaatatggtctaaaagacatacaacatggaacacagtgattgggagttttcctggagcagtaccaccactaattggatgggttgcaattgaaggacaaattagtttaacagcgattgcgctgtttttagttgtattttgttggcaaccaattcatttttatgccttagctattaaacgtaaagatgaatatgcacttgcaaatattccaatgttaccatcagttaagggctttaaacgtacacgtgtcagtatgtttatctggttgattattttattgccagtacctttattactaataaatttaggtgtcgtattcgtagtgttagctacattattaaatttaggatggattgcattaggtttaacaacatttaagaaaaattcagatcaaacaaaatgggcaacacaaatgtttatatattcactaaattatttagtgatctttttcgtgttagctgtgattgtttcattacttactttgatctagattaattaagttaggatgaaaaatatgggcgttccaattttaccaacgattagtacgacatgtattgtcattagtgcaattttaattgccattggttggagacttatttggaaaagggaaataaataaacacaaaaatgttatgttagctgcagcagtttttgctttaacttttttcttaatctatgcaagtagaacgatatttatcggtaatacagcatttggcggaccagcatcaattaagaaatattatacgattttcttatttttccacattaatttagcaacaattggtggtattctgggtctagttcaaattattacagcatttaaagataaatataatgtacaccgcaaattcgggccattcgcttcagttatatggttctgtactgcaattacaggtgtagcagtttacttattattatacgtattatatccaggtggagaaacgacatcactgattaaagcaacatttggtcattaatacgcttatacaaatgatactaatctgataaggcaatttgttttatcaggttttttgatgaagaatagtcggacagttgatggtattcatttgataccttaactgtccattttttacatattttaatcctaataatgaatttcaacctgaaaacataaagataggttatgatatagagtgtagggaaaatctttatgatgttaacgttatgcctgaagatgattttgtttcatcgaaacgacacagttatgtcagtgttgaaaatttgctaattaatgtgttgttttttacaatagtattaatactttttaggtggttgattgatgaaaaagttaattataagagtcgtcggtgtattatttttagttggatttttaatatatcttttttattcaccgagattaaaatttgatgtattagagaacccgaataaaggtaataaagtaaatagatctgaacaggtgaataaatcaaataaccatgctgaaaatccaaagcctaaagaaggtgttggtacatgggtaggtaaagatattaaagtgcttacttctaaatttggacaagcagatcgtgtctacccttttagagatggttacaaaaattatgtatttaaagacaaaaacagttattacattgtttcaactaaacgtgaagaaatcgtttcagtgtatgctacaggtgaaaaagtaaatgttagtccgttaaaaataggacaacattctgcagaaatttttaatcatacaagtattaatccagaaccgtcctttacagttgatggtaaaaaatatgaatttgaactttcagatgaagatttaaaaacacaaacactgattaaatatggcaacatatatgcacaagtgtattctgatcaacaatcgaaaaaggtgctaagtgtacgatttttaacaaaaggaatgttagcagatattgaaccttatcaattaaattctaattctacgtcagaagagcataataagcgtccagttgagcaaaatccaaatcaattaatttctctttatgaagtaacgaatgaaatgagaaaattaaaaggattaaaaccattgaaaatcaatagcgatttagcacatattgcatctaataacttatatgaagcgacatctaatggttctgatagtgttgaatttacagaggacgcattaagagggcaattagataaaaatcacgttacttataaaacaactgctcaaaatgttggttatgcatttaatgatgtaccaacattaatccatagttggatgaattcagatatacatcgatctcgtctattaaattcaaaatacgatgagatgggtggagatgtaatgagagattattattcactaattttcttagaaaaataacaatgaggggtatttatgattaatgaagcttcactagcgatattagatgatattgatgaactagctgatatgatagttgcatcagatatttatgcatcatttgagcaagctaaacaggcgctcgaaaacaatgacgaagcacatttactttatcaatcatttttaaaatcaaaagagaaatatgatgaagtaatgcgtttcgggaaatatcatcctgattataagaaagtcatgttagagacaagacaacgcaaaagagcatatgagatgcttgacgttgtgatgcattacaaagctagagaaatggcacttcaacatttaattgatgaagttgttacgaaaattgcgtacgctgtttcagaacatgtcaaaatagaaacaggtaatccattctttcaaacatcacatagtggttgtgcgacgggcggatcctgtaattgttcattataaaaaacatcgagtcagaaaaagatggttattgaaaccatttactagcatctgactcgatgtttttgtttattgtttgttgtttattgtttgtttgaattgttgtgctaaatctggtcgatcagtcactatagtatgtgcacctttttggtataaatcattcatcagatctatactatttacgccataatagcctggaatgatattcatatcatttaaccatttgataaaacgagatgaagtcaaattaatacctttaaaatgagtaggcagttggaacgtttgtgctaatggttggtagtacctaccacctaataaatgatattttaaaaatgcctctgtaacttcctgttggctagcaccaattgcaacagatccttgtgcaattttattaaaacgtacgatttgttctttataaaaacttgtcacaagaacacggtcaaatgcttgattctctgcaattgtatcaaacataatttgtggtgcgatagaaccttcataggattcaggagcatcttttaagtctacgtttatatacatatcaggatattgcttcagcaactcatcgaaggttagtatagctgtgtgtgcatgaccacgatatggtgttagtccattgatatctttgaagtgataacctgcgtctaatttctttaattctgctaatgtatgggcactaacttttccagagccgttcgtcgttctatcaacagttgcgtcatgaaaaacgataagctgttgatcttttgtgagtctcacatctgtttcaaagccatcaacgcctaattgtttagcatagtcaaatgcaagttgcgtttgctctggtcttaaagccataccaccgcgatgcgcaaatatatatggtgcattgcctttgaaaaaagcagggatggtttgctttgtagtaatcactttatttttatttatcattaacagactacttacaaatccagcaccgactagtaccgcatttaaaatgtttctgtttacttttttcataaaaaattcctcctcgtttacttttatagcttaacaaattcatagttctgactacagcgaaatgtgtggttaatcataatagtgatactcttgagaattgaattaatataatctaaatacatttatcatgcaattacataagacataattaaggtagcttaatattttaaaattaataaagacatgatatgattaatgctgaaaataaatggagtgaggtttaaatgaatttaatcccaagaactagtattgtagtttatttaaaacatatgaaacatgaacgacaaatccgaaaatatggacatatcgttcattcaaatagagatcgtaaatttgtaattatgtatgtgaatgagcaagatgttgatcaaattgtacataaattaatgcaacttaaatacgttagacacattgatggctcaccatataaatacttaaagaaaacttacgaaaaagagaaacacgaaatatataattaatattattgaagttctggtatccatttttggagccttaacacactaattaaataattataatataacgataaatcatgaaatgcttgagggggctgtacatcgatacctaaaataggtatgtcgaatttttcagcacaatcattaatcatttgaaactttttatttgaatctggatatggatatttaatagcgttaatcatgatataaaatgcttggaaatgattgccagttgtagggttcataatgattgctacagatgactttttattttcagattgtggtgaatgaaaatagataattttatcaatacgttgatggttatattcaatcatcgtcatgaattcgaacaaatctgttagaccttcaccaagtgtaataaatgtttgtttcattggtttatcattctcctttttctcaataaattatattaaataactaaatgaattggaagtgtgaacaacatgcgcgtcattgcaggtaaacataaaagtaaagctttagaaagtatggaaggccgtaatacgagaccaactatggacaaagttaaagaaggtatctttaatagtttatatgatgtgtcaggtataggtttagatttatttgcaggaagcggggcgcttggaatagaagcactctctcgaggtatggataaggttatctttgttgatcaaaattttaaagctgtaaaagttattaaatcaaatcttgcgaatttggatttagaggcacaatctgaagtttataaaaataatgcagatagagctttaaaagcattgtcaaaacgtgatattcaatttgatgtcattttcttagatccgccatataataaaggtcttattgataaagcactaaaacaaatttcagagtttaatttattgaaagaaaatggtatcatcgtttgtgaatttagcaatcatgaagaaatagactatcaaccgtttaatatgattaaacgttaccattatgggttgacagacacattgttattagaaaagggagaatagcatggaacatacaatagcggtcattccgggtagttttgaccccattacttatggtcatttagacattattgagagaagtacagatagatttgatgaaattcatgtctgtgttcttaaaaatagtaaaaaagaaggtacgtttagtttagaagagcgtatggatttaattgaacaatctgttaaacatttacctaatgtcaaggttcatcaatttagtggtttactagtcgattattgtgaacaagtaggagctaaaacaatcatacgtggtttaagagcggtcagtgattttgaatatgaattacgcttaacttcaatgaataaaaagttgaacaatgaaattgaaacgttatatatgatgtctagtactaattattcatttataagttcaagtattgttaaagaagttgcagcttatcgagcagatatttctgaattcgttccaccttatgttgaaaaggcattgaagaagaaatttaagtaataaaaataacagtattttaggtttatcatggtttacaatcctaaaatactgttttcatttgttaacgatattgctgtatgacaggcgtgttgaaatctgtttgttgttgcccgcttattgcattgtatatatgtgttgctttgatttcatttgtgaagtaatgtgcattgcttttgttaatattggttatatattgtctttctgggaacgctgtttttaaatgctttaaatattgtctgccacggtcgttcattgctaatactttaactgcgtgaatgtttctcgtaacatctgtaagtttaatgtttaataatacattcattaacagtctttgaatatgcgtatatgtataacgctttgtttttagtgattttacaaaatgatgaaaatcagttgcttcattaatgttagattttaaacgattttcaaaaccttcagtaacagtataaatattctttaatgactctgtagtcatagctatgatttgatatttcaaatatgggaatatttgatttaatgttatatgaggtgttacgtacaggtgttgaatatctttaggtaccacatgatgccaatgatcatcttgactaatgattgatgttctaatagatgtaccacttgcaaactgatggtgttgaattaatgaatcatgatgttgagcattttctcgtttaatagaaattgcattgatgtttttagcatgtttagcaattgctttcagataactaataccaagtatgttgttaggacttgctagtgcttcatgatgccctaataattcgctaatgatacgagggtagcttttaccttcttttactttttgtgaaaaggattcggattgttcaatttcattaatgctgtgagctaattgctttaatgttttgatatcattattttcactaccaaatgcaattgtatcgacactcatataatctgcgactttaactgctagttcggcaaaatgatcgccagatgataaactggcagttgctggtagttcgataactaaatctgctgttgataatgccatttttgcacgagtaaacttattatagattgctggttcgccacgcatgacaaagttaccactcattattgcaatagtaacgtcagcatttgtaagttttttagattgattaatatgatattgatgcccattatgaaagggattatattctgtgattaagccaacgcttttcatttgcaattcgtcctttcggtattcattattaatattgtaacagaacatgatatgttaagaaaaaatcttgacaacttgttcttagaaagttaaaataaattttgtgcttgttagaggtgaagccatatgaaatggtcaattacgcaattaaggaaatatcaaggtaagccatttgaatttgatcaaacggtgagttttgacaatttaaaagaatcattagatttaattgatttatctccaattacaatccaaggtcagttaaccattaagtcaacagaagtcgttgcggatattcacattactggaacgtatacaatgccttgtgcacgtactcttgtaccagttaaagtcccactagatgtaactactacagaagtatttgatttagaagggtacaatcagtataacgatgatcaagatgatgtagatgaacactatcacattattaaagatggtatggttaatcttcaggatattgtcgaggatatagttattattgagaaaccaatgagagcttattcagagcaaagtgaccaaatgttgacagtaggtaatggttgggaagtaatcgatgaggatcaattagatgagcttgctaaacagcaagaacaagatgattcagaatcacgacaagttgatccaaggcttcaaaaattacaacaattatatgataaagagcaataagtagtttaattaatgatataatgttgttaattaaactaacatttagtatttttcgtttataatctaaggaggatatatcatggcagtaccaaaaagaagaacttctaaaactagaaaaaacaaacgtcgtacgcatttcaaaatttcagtaccaggtatgactgaatgcccaaactgtggcgaatacaaattatcacaccgtgtatgtaaaaactgtggttcttacaatggcgaagaagtagcagctaaataattttagttactcaatataaaaagtcccgcttaaaatgattgttttaagtgggactttttatattgcaaaaaataattggcggacgaggtatcggaatacctcatctgccaattaaaaattgttaatttaataattaaatataaagacgattaattagtttttacgttttctaggtaatacgaatgcaatgatgctgcttaaagctaataatgccattaatggtaatgtcatatctttattcgattcttcaccagtttgtggtaatgatttagctttattttcttgtgtatttttattgttttggctttgagtatgtccatcatttgtgtttttaatgtttgctttttgtaatggagcattatcttttgcttcgctagaacctgctgaagtttgaacaacaccttttgttgtttctgaagaagcagatgtaggttttgcaacattttgagtcgcagatactaccttagttggagttgtactacttgattctacttcacctttagctggttttgtagcaggcgttttgtctttacctgactcactagatgcatcaatttctttttcaacacttggtgattgtttattgtcatctttttggctgtcttgtttttgtgattctttttcaacaggtgctgttgttggtttgctaggcgtagctggtgtagtttccttcttagctgagttgtcttgttgttcctttttattagatttatcggcattggctttagtaaatgcttctttatcaacgattctgacatggtattgtccatcataatcaatcgtttttacgtgaactttaacgatagcatcatatagggttttaccttcaacatatgggaaaataatcgttctagtgttatttttagcatctttgctaattgttctaacacgttcaccttcaaccatgaaatctttccagtaatcgtcattagtagtttccattaccatatattttttgccgttaagcatacctgttttaatagggtgtttaacaaaagtatccatcatagattcgttattctcaacactttcataaacaacatattttgtatcttgtaaatcagtcattttttcatttgttggttgtacattttggaattcagttattgcggatttcacttgttcatctaaagcttttttagtctcttctaatttcttcttgtattcagctttcaatttttcgggaagtttatcttgaattttatttaattcataaacttgtctttctagtgttttcgcttttttatatggcgctaataatttttcagctttgtaatcttcttcagttttgaatttatctgcactgttataaatcggttgcgcgaattccattaacgtgtaatcatatttttcttctttattattgaagtgagttgaacttacgattttaactgcttttgttccatttgaaacagagaagcgaatgtaagcatagtctttaacagtatcatatgatactaatttgattggtaattttttgtcaccttcataaacttcaaattttctccaaaattgacctgattgtaatcctaattcaatttctggttttgaatcagtgaaaataactctagcaggtttaacagaacttgcataatgataaaactgttgagtgccatctttctttttcatttcaaaatcaattggacgagagtttggtgcgctatgatctttatcttttattgctgggtttttaatcgcttctctaagttcctcattcaaaataggatatgtattgttatcggattttgctgctggtttaacttcttttgtttcattaggggctttaacttctttaacttctttagcttcttttgtttcagtagtaggggccacaacttctttattagatacggagacagcattagctactggtttagcttctggagctttttcagttgttgttgttggacttgcaactgcttcagtttttggttgtgtttctgtaattgtaccacctgtttcttcagctgcttttgcttcgccatttgacattaataataaaagtgtactaatcgctacagatgcaacgcctagtgatgactttctaattgaataaaatgatttaaattctttttgctgtttgttcatgttgtagtaacaactcctaattgtatattatcaactgataatcattatcaattgattacttgtattgtacattgaaatggtagttaattgcaacgttattttataaaaaaataacctatgttatagattatggaatatctatgacataggttaaataaaatttaaaataaaaaatatattaagttatgagtgtgacgaagatttatttagattcttttcttttgaaaagtaacaaagataatgaacctaaaagggcaagtgttgcgaaggcaactgtgctaataaagttatcaactgaagttaaaccagtttttggtaattctttagctttagatgcttgtttaggcgtttcgttttgttttgtaactttgttagtttgttgtgatttattgtcacttacagcttgattgttgctttcagatttcgctgttgcaacatctttaacaggtgtttgaactttattttgttcttgagctgtttgtgttgttttcactgtacgagcactatgtgtttgactttgatcttttgtagcttcagtacttacaacttttgtagtttgtgtgttttcagctttgcttggtgcagttacagcaggtttaactttttcaactttaggttgaacaggtttcgtttgctcagtaggtgttttaggttgagcaggttttggttgaaccggtttaacattgtttggttttgctgcgtcagctaatgtaggaattgctttttcaaattctaaatgcgtagtatatctatgattgtaattaatttgaggtacgacaatatgtacttttgtagttaaactcttatacccaggttcaacagcaacgttgattgttctagtgtcagcttttttatcatcgttaacaacagttgttgctaattcttgattgtttacattgtaaaatttgtattctttccagaatgatgcgttgttcaatacagcttggaaataatatttattattttgtttaattactttaccagggtgttgcatatagtcatccatgtgtgacttctctgaagagccatctttttgcacttggaaattaattggttgtgatgttgcttgagaaacttgtgtgctttgattattagttgcgttcgtagcttctgttgccgcattgacttgttggctgtctgcgcctatgtatacaagggaacctaaaatgatagatgctgtacccattgtaatctttttcatagctgatgaacgttgttctgattgatacttactgtttaaataatgttttgtcatgttgttttcctcctaaggatacaaattatgtgttgttatatgagatgattaaccattgcaattgataatggttatcaattatactagcacatctattttcgtataacaataataaattgattataaaataaatattgacaatgataatcattattatttatgatttcagtaaagacttaaaagcaatcataaaaaggaggattatgttatgaaaaatattttaaaagtttttaatacaatgattttagcgttaattatcatcatcgcgacattcagtaattctgcaaatgccgcggatagtggcactttgaattatgaggtatacaaatacaataccaatgacacgtcgattgctaatgactattttaataaaccggcaaagtacattaagaaaaatggtaaattgtatgttcaaattactgtaaaccacagtcattggattacaggaatgagtatcgaaggacataaagaaagaattattagtaaaaatactgccaaagatgaacgaacttctgaatttgaagtaagtaagctaaacggtaaagtagatgggaaaattgatgtttatatcgatgaaaaagtgaacggaaaacctttcaaatatgaccatcattacaatattacatataaatttaatggaccaactgatgtagcaggtgctaatgcaccaggtaaagatgataaaaattctgcttcaggtagtgacaaaggatctgatggagcgactactggtcaaagtgaatctaacagttcgaataaagacaaagtagaaaatccacaaacaaatgctggtacacctgcatatatatatgcaataccagttgcatccttagcattattaatcgcaatcacattgtttgttagaaaaaaatctaaaggcaatgtggaataatgagaaatgttaaacaaattgctacaaaatctattatagctattattagcttaggtattcttacatatacaacaatgattggtagcgtgttggctgatgagataaaatatccatcagccaaatttaatcaacctgaagcaaaagataaaacagaattaacttcatcaatttttgatgaaaagataaaagagaataaagcgttagatttactaatttttaatcaagaaaataaaaatgtaactgaggaacaacaactagttgatgaaaaggcgcaattgatttcagatatgactggtaaaatttacttgcaagtaaaactaaaaggtaaaattgataaagaacaacttgtttttcaaaatgacaaaaatgaagaatttccttttgttataaaagatgaaaaggatgacacaatagtaagaattttaattgaacagcatatggataaaatcaatatgcatgttaaaacgttggttgaaaagaaagatctagataacaaagaaatggtgtattctattcattttaaagagaaaaaagtacaacatgacgatgcaaaagaagtgccttcaaaacatcaaaatcaagaaaataatcaagatcagcttaaaaaagatattgatgacaaaaaagatagtcaaaaatcagacattaaggaaagacgtactagcctttttactgaaaaaggattaaatgatattcctgtacaaaaagataaagtgcaacaaaacagtaataaaaagattgaaaacgagcgacctaaagcatcaagtacattaagagttgaaaatagctctccaacagtaaaaaaggttgaaaataatcacaaagagcaaccgaaacataaagatgaaaaatcaaaaaaggaaaagaaaaaagtagttgaaaaagaaaaagcgttaccagcttttaatagagatgatgatagcaagaatagtagtcaattatctagtgatattaaagaacttgatgaaccaaatcataaaaagcaatatatgttatttgcagctggcattgtgttagcaaccattttacttatttcggcacatttatacagcagaaagagaggtaaccaagtttgagaatcataaagtatttaaccattttagtgataagcgtcgttatcttaactagctgtcaatcttccagttctcaagaatcaactaaattcggcgaattcagaatcgtaccaacaactgttgcattgacaatgacattggacaaattggatttgccaattgtcggcaaacccacgtcatataagacattgcctaatcgttataaagatgtaccggaaattggtcaaccaatggagccgaacgttgaagctgttaaaaagttaaaaccaacacatgttttgagtgtgtcaacgattaaagatgaaatgcaaccattttacaaacaattaaatatgaaaggctacttttatgattttgatagtttaaaagggatgcaaaagtcgattacacaattaggtgatcaatttaatcgtaaagcacaagcaaaagaattaaatgaccatttaaattctgtaaagcaaaaaattgaaaataaagcagctaaacaaaagaaacatcccaaagtattaatattaatgggtgtacctggtagctatttagtagcaactgataaatcgtatattggtgatttagttaaaatagcaggtggagaaaatgttattaaagtgaaagatcgtcaatatatttcgtctaatactgaaaatttgttgaatatcaatccagatattattttacgattaccacacggaatgcctgaagaagttaagaaaatgtttcaaaaagaatttaaacaaaatgatatttggaaacattttaaagctgtgaaaaataatcatgtttatgacttagaggaagtgccattcggtattacagcaaatgttgatgctgataaggcaatgactcaattatatgatttattttataaggataaaaaatagtgagttgatatgatgataaaaaataacaagaaactactatttttatgtttgttagtcattttaatcgcaacagcttatatttcgtttgtaaccggtacaattaaattgtcatttaatgacctaattacaaaatttacaactggtagcaatgaagcagtggattcaatcattgatttgcgattaccacgtatattaattgcattgatggttggcgcaatgttagcagtttctggagcattattacaagcagcactacaaaatcctttggcagaggcgaatatcattggcgtttcatcaggtgcacttataatgagagcactttgtatgttgtttattccacaattgtacttttacttaccattattaagttttattggtggtttaataccatttttaataattatattgttgcattctaaatttagattcaatgctgtaagtatgatattagtaggcgttgcgttattcgtattattaaatggtgttttagaaattttaactcaaaaccctttaatgaaaattcctcaaggcttaacaatgaaaatatggagcgacgtatacatattagcagtatcagcattattgggattaatattaacattactattgtctcctaaattgaatttactaaatttagatgacgtacaagcgagaagtatcggttttaatattgatcgttacagatggctaacaggtttattagcagtatttttagcaagtgcaactgttgcgattgttggacaactagcctttttaggtattattgtgccacatgtggttagaaagctaattgggggcaattacagagtacttattccgttttctacagttattggtgcatggctattgttagtggctgatttattaggacgagtgatacagcctcctttagaaattccagccaatgctattttaatgattgtcggtggtccaatgctaatttacttaatttgtcaaagtcaacgaaatcgaatataaaacggtacaacaactggtttagtagtgactgaagaaacgtcgttaataaaagaggatttttatgagaataaagcgatttttaactattgtacaaattttattggttgtaattattatcatttttggttacaaaattgttcaaacatatatggaagacaagcaagaacgcgcaaattatgagaaattacaacaaaaatttcaaatgctgatgagcaaacatcaagcacatgtgagaccacaatttgaatcacttgaaaaaatcaataaagacattgttggatggataaaattatcaggaacatcattaaattatccagtactacaaggtaagacaaatcatgattatttaaatttagattttgagcgagaacatcgacgtaaaggtagtatttttatggattttagaaatgaattgaagaatttaaatcataatactattatatacggacaccatgtcggtgataatacgatgtttgatgtgttagaagattatttaaagcaatcattttatgaaaaacacaagataattgaatttgacaataaatatggtaaatatcaattgcaagtatttagtgcatataaaactactactaaagataattacatacgtacagattttgaaaatgatcaagattatcaacaatttttagatgagacaaaacgtaaatctgtgattaattcagatgttaatgtaacggtaaaagataaaataatgactttatcaacgtgcgaagatgcatatagtgaaacaacgaaaagaattgttgttgtcgcaaaaataattaaggtaagttaaacagaaaagaggataattatgaaatttatggcggaaaataggctgacgttaacaaaaggaacagcaaaagatattatagaacgattttacacgagacatgggattgaaacattagaaggctttgatggcatgtttgtaacacaaactttagaacaagaagattttgatgaagtgaaaattttaacagtttggaaatcaaaacaagcttttacggattggttaaaatctgatgtctttaaagcagcacataaacatgttagaagtaaaaatgaagatgaaagtagcccgattatcaataacaaagtaattacatatgatataggctatagttacatgaaataattgaatttaaagaggttgcagtacttgttatgacaattggtattgttaacttttgtaacgaccatacatgatactgatgatggtcgttttttttaatgaacacaaacatgctaacaacaaattgctaaaacgtagtttgatttgaatgtgttttgaaaataatcatcaattatatgattttgatttattttgaagaagaaaagaattaataatgatattttggggcgtatgatttatagtagtagtatcgataaaagaaatttatacaatttgaaataatatgagtgataaaatcgattaattaatattaactatacaatcaaatgttttcatcttattaatgattaatatttttatttttaaaaataaagtgaggagctatctatggaacaaattacttctgcacaaaataatagaattaaacaagcgaacaagctaaaaaagaaacgtgaaagggataaaactggattagctttaattgaaggtgtgcatttaattgaagaagcttatcaaagtgagattgtaattacacaattatttgccattgaaccggcaagattagatcagcaaattatcgcatacgcgcaagaagtttttgaaataaacatgaaagttgctgaatctttatcaggtacagtgacaccacaaggttttttcgcaatcattgagaagccacaatatgatatttctaaagcacaacaagtattgcttatcgatcgtgttcaagatcctggaaatttaggcacattaattagaactgcggatgctgctggaatggatgctgtaataatggagaagggtacgacagatccttatcaagataaagtgttgcgagcgagtcaaggtagtgtttttcatttgccagttatgacacaagatctcgatacgtttattactcaatttaatggtcctgtttatggtacagcacttgaaaacgcagtggcatataaagaagttacttcaagtgattcttttgcattactattaggtaatgagggagaaggtgttaaccctgaattattagcacatactacacaaaatttaatcatacctatttatggtaaagctgaaagtttaaatgtagcgattgcaggtagtattttactttatcatttgaaaggttgaccatgttgaaagttttccgatataattataattaattgtttaacagaacatttctacgtgattgcatacacaattgaatataaaccaataaaaaggcatggacatttatataaataattgttttagggagaataatcgtgactgcaagttattccaattatttaaagtcttttcacctttttggttacttaaagagatttaagtcggaaagacaatccgttatcaatattaaacaagtgtatgcttaggcataaatttgggtggtaccacggaaatgactttcgtcccttatttttaagaggatgaaagtcattttttagttaaacaacaaatatgataaacagaaaatgaagagttcgaatagggaggtcagtgacatatgtctgaacaacaaactatgtcagagttaaaacaacaagcgcttgtagatattaatgaagcaaatgatgaacgtgcactgcaagaagttaaagtgaaatacttaggtaaaaaagggtcagttagcggactaatgaaattgatgaaggatttgccgaatgaagagaaacctgcatttggtcaaaaagtgaatgaattgcgtcaaacaattcaaaatgaattagatgaaagacaacagatgttagttaaagaaaaattaaataagcaattggctgaagaaacaattgatgtatcattaccaggtcgtcatattgaaatcggttcaaagcatccattaacacgtacaatagaagaaattgaagacttattcttaggtttaggttatgaaattgtgaatggatatgaagttgaacaagatcattataacttcgaaatgctgaatttgcctaaatcacaccctgcacgtgatatgcaagatagtttctatattacagatgaaattttattacgtacgcatacatcaccagtgcaagcacgtacgatggaatcacgtcatggtcaaggtccagttaaaattatttgccctggtaaagtgtatcgtcgtgactctgatgatgcgacacatagtcatcaatttacacaaattgaaggattagttgttgataaaaacgttaaaatgagtgatttgaaaggtactttagaattgttagctaagaaattatttggtgctgatcgtgaaattcgtttacgtccaagttacttcccattcactgaaccttctgttgaagttgatgtgtcatgttttaaatgtaaaggaaaaggttgtaatgtgtgtaaacacacaggatggattgaaattttaggtgctggaatggtacatcctaatgtattagaaatggctggttttgattcttcagagtactctggatttgcatttggaatgggaccagaccgtattgcaatgttgaaatatggtatagaagatattcgtcatttctatactaatgatgtgagatttttagatcaatttaaagcggtagaagatagaggtgacatgtaatgttgatatcaaatgaatggttgaaagaatatgtaacaatcgatgattctgtaagtaatttggcagaacgtattacgcgcacaggtattgaagtggatgatttaattgactacacaaaagatatcaaaaatttagttgtcggcttcgttaagtcaaaagagaaacatcctgatgctgataaattaaatgtttgccaagttgatatcggagaagacgaacctgtacaaatcgtatgtggtgcaccgaacgttgatgcaggacaatatgtcattgttgctaaagtaggtggaagattgcctggtggtattaaaattaaacgtgccaaattacgcggtgaacgttcagaaggtatgatttgttcgttacaagaaattggtatttcaagtaattatataccgaaaagttttgaatcaggcatttatgtatttagtgaatcccaagttccaggaacagatgccttacaagctttatatttagatgatcaagtaatggaatttgatttaacgccgaatcgtgctgatgccttaagtatgataggtactgcttatgaagttgcagcattatataatacaaaaatgactaagccagagacaacatcaaatgagcttgagttatctgcaaatgatgaactaactgtgacaattgaaaatgaagataaagtaccatattatagtgcacgtgttgttcacgacgtgacaattgaaccctcgccaatttggatgcaagcacgcttaataaaagcaggtatacgtcctattaataatgttgtcgacatttcaaattatgtgttattagaatacggtcaaccattgcacatgtttgatcaagatgcgattggttcacaacaaattgttgttcgtcaagctaatgaaggcgaaaaaatgacaacattagatgatacagaacgtgaattattaacgagcgatattgtcattactaatggacaaactccaattgcattagctggtgttatgggtggcgatttttcagaggttaaagaacatacatcaaatatagttattgaaggtgctatttttgattctgtttccattcgtcatacatcaagacgtttaaatttacgcagtgaatcatctagtcgttttgaaaaaggaatagctactgaatttgtagatgaagcggtcgaccgtgcatgttatttattacaaacttatgcaaacggaaaagtgctaaaagatagagtatcttcaggagaacttggtgcatttattacaccaatcgacatcactgctgataaaattaatcgcactattggatttgatttgtcacaaaatgatattgttactatttttaatcaactagggtttgatacagaaataaatgatgatgttattacggtgcaagtaccatcacgtcgtaaagatattacaattaaagaagatttaattgaagaagttgcacgtatatatggatacgacgatattccatcaacgttacctgtcttcgaaaaagttactagtggtcagctaactgatcgccaatataaaacgagaatggttaaagaagtgttagaaggtgctggattagaccaagctattacgtattcgttagtttctaaagaagatgctactgcatttgcgatgcaacagcgtcaaacaattgatttattgatgccaatgagtgaagcgcatgcgtcattacgtcaaagtttattaccacatttaatcgaagcggcatcatataatgtggcacgcaaaaataaagatgtaaaattatttgaaatcggcaatgtcttctttgctaatggtgaaggtgaactaccagatcaagttgaatatttaagtggtattttaactggagattatgtagtcaatcaatggcaaggtaagaaagaaacggttgatttctatttagcaaaaggtgtcgtggatcgagtagctgaaaagttaaaccttgaattcagttatcgtcgtgctgatattgatggattacacccaggtcgtacagctgaaatcttattagagaataaagttgttggttttattggtgaattacatccaacattagcagctgataatgatttaaaacgtacgtatgtttttgagttgaattttgatgcattaatggctgtgtcggtaggttacattaattaccagccaattccgagattcccaggcatgtctcgtgacattgcattagaagtaaatcaaaatattccagcagctgatttattatcaacgattcatgcacacggtggtaatatattaaaagatacacttgtctttgatgtatatcagggcgaacatttagaaaaaggtaaaaaatcaattgcaatacgtttgaattatttagacacagaagaaacattgacagatgaacgcgtttcaaaagtacaagcggaaattgaagcagcattaattaaacaaggtgctgttattagataatgatttaaaccccatgtattaggatatctgaagtagattgatatccttaacatggggttttatttttggattcacctattaggttccgattcatttaaaaagtcaaagagaaacagtggaatacagatgatggattgcatcactgcatataaagtcatacatttgagtaaagcaaattagtatgactcacctaataggatcacctattaggttccatttcatttataaatcaaagaggaacagcagaatacagatgatgcttcgcacaactgcatataaagtcatacttatgagcaaagcaaattagtatgacttacctaatagaatcacctattaggatttcctattaggatccatttcatttataaatcaaagaggcacagcggattacagttgatgctttgcacaactgcataaaagcctctaatgattataaatcaaagaggcacagcggattacagttgatgctttgcacaactgcataaaagcctctaatgattataaatcaaagaggctttaaaattttttgggctttttcacgatttttaaaatgcttttttgaaatggtatctaaacgtgaaataccgtatttttttataattttggcggcgattacatcgactttagcaccggcacctttaggaattgtcatattaatattttttgatatttgatccatatatgtaacaaatgcgtatctagaaattatgcttgccactgcaatggctaatgacttcgattctccttttgtttcaaattttgttttctttggaagtggtatatcggataatgcataatggctatacacttcgcgttttgcgaactggtcaatcacaatataatccaattgagacgaatcaattttttcaaggacattcttaattgcttcattatgaagaacagctttcattttgacttgagtccagccttttgcttgctgaatattatatttttcattgtgtagtgttaatagtgaatgtgggatgaaagtaaccaattgctcagcaagatctacaattttggtatcagttaatttttttgaatcatctacacccaaagtttttaaaatagggacatgctctttggtaacgaaagcagcacatacagtcaatggaccaaagtaatcgccacttccagcttcatcactaccaatacagttaaattgatcatacattaaagtttgttcaagaaaagaattagccatatttttctttttagttttattagtattcaattgagaattctgcggtagaagttcttgagacacagcttctgcatgattaccttgaaacatgactttacctgattggtaaatatttacggttgtattttgatactttgcacgtgctttcataccttgaggtaaattctcagtatcaaaagaaatgcgtgacattaatgtcgttatgtctttatccgacaatttaaaaacgatattcgccatttgtgtaaatcctttcatataatttcattatcattagcaaaaataatcatatcataaatgataataacgtcagaaacatttatatatgttgtaaagaattaattgcggatacttacaaaatacatagtggtcatgtataatgtttatgaaaatgttatagtgacacaatttaaacatgataaagtattgaatagaaaattctttacattatttcatttcattataaaaagaacattaagtcatctatagagattgtgttgttgttttatcataattgcaatataacaatattagtatcaaattcagataaactatccagtcatattttataacgtgaatttagattttaaaaaaaggatcaggagaaattataaatggcacagtttaaaaacaaggtaaatgtatcaattaatgatcagctttttacaattgttggggaagataacccagagcacatacgatatgtagcacatttagttgatggtaaaataaaagaattagggtataaagcagcaggtttagatacttcaagaaaagcaatactaactgcagtgaatattatgcatgaaaaagtactactagaagaagaaaatcgacgtttgaaacaacaaattcacaaattgcagcagcgtgagcaataaatgatcattgattttatcataatcattttctttgtgtattttgtcatcgttggattcagacgaggtttttggttatctatgatacatttgagtgcaacgattgtatcattggggattgccagtcaattttacaaatctattgtagaaagattaattgtatttattccatatcctaaaacaacagcatttaatacaacttttgcgtttcattttaatcatctacaacatcgatttgaagcgattgtagcttttttaatgattacattgttttgtaagttcattttatatctaattatcgtaacttttgataaaataatagcgtatcaaaacattcatattttcagtcgtgcaatgggaatgatagttggtgtgtttatgacgataattgtcttacactttacattatatctattggcattatatcctaacgaagcattacaacatcagcttaaaatatctattgtgagtcattcattgatttttcacatcccatatttatcggctttcaccattaatttataaattatcataagaggtcaggacaaaggtatatattaatgatacgtcctggtcttctttttatggagtgttattatgacaaaaaaagatgttatcaaactattagaacaaattgctacttatatggaattaaaaggggaaaatacttttaaaatatcagcgtatcgaaaagcggcgcaaagtcttgaattagacgaacgcccattagaagatatttctgatgtaacggaattaaaaggtatcggcaaaggtgttgcagaagttattaatgattatcgaaatactggagaatcacaatatttacaacaattgcaggaggaagtaccagcaggattgattcctctattgaaaattcaaggacttggtagtaaaaaaattgccaaattatataaagaattaaatatcgttgataaagaaagtttacaggttgcttgtgaaaatggaaaagttagtgaattaagcggttttgctaagaaaaccgaacaaaacattttagaagctgtgaaacaaatgggtgccaaaaaagacagttatccaattgatcaaatgagaaggcttaatcaagaaatcattgattatatagatacattaaattatatcgatcaatattcatctgcaggaagcttccgtcgttttaaagaaatgagcaaagatttagatttcataataagtaccgataacccaaaagcagtgcagcaacaattattaaatattcctaataaagtaaaagaagttgcagtggggaacacaaaagtttcattagaattagcgtatgatgatgaaacgattggtgtcgattttcgattaattgaaccaagtgctttttatcatacattgcagcattttactgggtcaaaagaacataatataagaattcgacaacttgctaaagcacgtgatgaaaaagtaagtgaatatggaattgaacaagctgatggtacattaattcaatatgatagtgaagccaaaatatatgaacattttaatgtgaattttataccacctgctatgcgagaagatggtagcgaatttgataaagatctaagtaatatcattacattagatgatattaatggagatattcatatgcatacaacgtatagtgatggtgcgttttctattcgagacatggtagaagcaaatatcgcaaaaggttataaattcatggtaattactgatcattcacaaagtttacgtgttgctaatggcttacaagtagaaagacttttaagacaaaacgaagaaattaaagcgttagataaagaatatagtgaaattgatatttattcaggtacagaaatggatatattacctgatggctcgctggattatgatgatgaaattttagcacaacttgattatgtaattggagctattcatcaaagctttaaccaatcagaagaacaaattatggaacgattagctaatgcatgtcgcaatccatacgtgcgacatatagcgcatccaacagggcgtattataggtagaagagatggttataaaccgaatattgaacaattaatggcattagctgaagaaacgaatacagtattagaaattaatgccaatccacatagactggatctgaacgctgatatcgttcgtaaatatccaaatgtgaaattaactattaacactgatgcgcatcatacaaatcatttagattttatgaattatggcgtagcaactgcgcaaaaaggatttgtaacaaaagatagagtgattaacgcattatcgcgtgaagcttttaaagactttattgaaaataatataaaacttaagaaatagagggattttatgagacaaaaaacattagacgtcttagaatttgaaaaaataaaatcactcgttgccaatgaaactattagtgacttaggcttggaaaaggtcaatcaaatgatgccagctactaattttgaaacggttgtttttcaaatggaagaaacggatgagattgctcaaatttataataagcatcgtttaccaagcttgagtggcttatctaaagtatcagcattcattcatcgcgctgatattggcggcgttttaaatgtatcagagcttaacttgataaaaagattaattcaagtacaaaatcaatttaagacattttataatcaattggttgaagaagatgaaggtgttaaatacccaatattagatgacaagatgaatcaattacctgtgttaaccgatctttttcaacaaataaatgaaacatgcgatacgtatgatttatatgataatgcgagttacgaattgcaagggattagaagtaaaatttctagcacgaatcaacgtattagacaaaatttggaccgtattgttaaaagccaagcaaatcagaaaaaattatcagatgctattgtaacagttaggaatgaaagaaacgttatacctgtcaaagctgaatatcgacaagattttaatgggattgtacatgatcaatctgcttcaggacaaacattgtatattgagccatcatcagttgttgaaatgaataatcaaattagtcgattacgtcatgatgaagcaattgaaaaagaacgcattttaacgcaactaactggttatgtggctgcggacaaagatgcactacttgtggcagaacaagtcatgggtcagttagattttttaatcgcaaaagcgagatatagtagaagtattaaaggaacaaagccgatatttaaagaggaccgtactgtatatttacctaaagcataccatccattattaaatcgtgagactgttgtagctaataccatcgaatttatggaagatattgaaacgttaattattacaggaccgaatacaggtggtaaaacagtaacattaaaaacattaggtttaattattgttatggctcaatcaggattgttgattccaacacttgatggtagtcagttaagtgtatttaaaaatgtatattgcgatatcggagatgaacaatcaatagaacaatcattatcaactttttcatctcatatgacgaatatagttgaaattttaaagcatgcagacaaacatagtttagttttatttgatgaattaggtgcaggtacagatccaagtgaaggtgctgccttagcaatgagcattttagatcatgttagaaaaattggttctctagtaatggcaacgacgcactatcctgaacttaaagcatatagttataatcgagaaggcgttatgaatgcgagtgtagaatttgatgtagatacattaagcccaacatataaattgttaatgggagtaccaggtcgttccaatgcttttgacatttctaaaaagttaggtcttagtttgaacattataaataaggctaagacgatgattggtactgatgaaaaagaaataaatgaaatgattgaatcattagagcgtaattacaaacgtgtagagacacagaggttagaactggaccgtcttgtaaaagaagcggagcaagtgcatgatgatttatctaagcagtatcaacaattccaaaattatgaaaagtctctaatagaggaagcgaaagaaaaagcaaatcagaaaattaaagctgcaacaaaagaagctgacgatattattaaagatttaagacaattgcgtgaacaaaaaggtgcagatgttaaagaacatgaattgatcgataagaagaaacgattagatgatcattatgaagcgaaatctataaagcaaaatgtacaaaagcaaaaatacgataaaattgttgctggtgatgaagtaaaagtattatcttacggtcaaaaaggtgaagttttagaaattgtcaatgacgaagaagcaattgttcaaatgggaattattaaaatgaagttacctattgaagatttagagaaaaaacaaaaagaaaaagttaagccaacgaaaatggttacacgtcaaaatcgtcaaacaattaaaactgaacttgatttacgaggctatcgttatgaggatgctttaattgaactagatcaatatttagatcaagccgttttaagtaattacgaacaagtttatatcattcatggtaaaggtacaggtgcacttcaaaaaggtgtacaaaaacatttgaaaaaacataaaagtgttagtgactttagaggtggtatgccaagtgaaggtggatttggcgttaccgttgcaacactaaaataaattataatttgataaattaattagctgcagttaaaataatgtaaagcaacaagaatacatttcaaacatgttatttgaaataagcataaaaattgagcaaatagaaatacatgaagcatgttatctgatataatttgaacatcataataataattaaggaggattggcatttatggcaatcgtaaaagtaacagatgcagatttcgattcaaaagtagaatctggtgtacaattagtagatttttgggcaacatggtgtggtccatgtaaaatgatcgctccggtattagaagaattagcagctgactatgaaggtaaagctgacattttaaaattagatgttgatgaaaatccatcaactgcagctaaatatgaagtgatgagtattccaacattaatcgtctttaaagacagtcaaccagttgataaagttgttggtttccaaccaaaagaaaacttagctgaagttttagataaacatttataagttacaaccaatgacgactggggcatttcttcaatgaattgctccagtttttgtttgtgtttttaatataaaaagttgaatgataaatcatcatattgtttacgacttgagtatggtgggattaataaatctatgaacgttaaatgttaatcaagcatgctgatagacatctagtagttggtttgataaaacaatgttcaatattacacgatgtgcatgcaaaatcatacttgaagatgttgattatgaacttgaatttagtggtgataagcttgaagcacttttgtaccatcattcattttaaaaatagaaggggggatatgtttggaagattataaacaacgaattaaaaataaattaaatgttgtacctatggaaccgggttgctatttaatgaaagaccgcaatgatcaagtgatatatgttgggaaagctaaaaaattaagaaatcgattacgatcatattttacgggcgcacacgatgctaaaacaacgagacttgttggagaaatacggcattttgaatttattgtcacatctagtgaaacagagtcattattacttgaattaaatttgatcaaacaatatcaacctagatacaacattttattaaaagatgataaaagttatccatttattaaaataacaaaggaaaaatatcctagactactagtgacgagaactgtaaaacaaggtactggcaaatatttcggaccgtatccgaatgcatattctgctcaagaaactaaaaagttattagacagaatatatccatatcgcaaatgtgataagatgccagataaattatgtctttattaccatattggacaatgtttaggaccatgtgtatatgacgttgatttgagtaaatacgcacaaatgacgaaggaaattactgattttctgaatggggaagacaaaacaattttaaaaagtttagaagagcgaatgttaactgcaagtgaatcacttgattttgaacgggctaaagaatatagagatttaattcaacatattcaaaatctaactaataaacaaaaaattatgtcatcagataaaacgattcgtgatgtctttggttatagtgttgataaaggctggatgtgtatccaagttttctttatacgacaaggtaatatgataaaacgagatacaacgatgattccattacagcaaacagaagaagaagaattttatacatttattggacaattttatagcttaaaccaacatattttacctaaggaagttcatgtgccgcgtaatttggataaagaaatgattcaatctgttgtggacactaaaatcgttcaacccgcgcgaggtcccaaaaaagagatggttgacctagctgcacataacgctaaagtatccttaaataataaatttgaattaatatcacgtgatgagtccagaacaattaaagcaattgaagaacttggaacacaaatgggaattcaaacaccaattagaattgaagcattcgataattctaatattcaaggtgtggatccagtgtcagcaatggttacatttatcgacggtaaaccagacaagaaaaattatagaaagtataaaatcaaaacggttaaaggtccagatgattacaaatcaatgagagaagtagtaagacgccgatattctcgcgttttaaacgaaggattaccattacctgatttaataatagtagatggtggtaaaggacatatgaacggggttattgatgtgctacaaaacgaattaggtcttgatatccctgttgcaggtttgcagaaaaatgataaacaccaaacatctgaattattatatggcgctagtgcagaaattgtaccactgaagaaaaatagccaagcattttatttgttgcaccgtatccaagatgaggttcacagattcgcaatcacctttcatagacaaacacgtcaaaagaccggcttgaaatcaatacttgatgatatagatggtatcggtagcaaacgtaaaacattattattgcgttcattcggttcaatcaagaaaatgaaggaagctacacttgaagattttaaaaatttaggtattcctgaaaacgttgcaaagaacctacatgaacaattgcataaataaattacagggcgtgagaatcattctcatgccccaaaatatatgaaataatgttacaatatggttaacaaagttatttttttgaatgtacgtggaagcgttttctaaatgagaaagtttatcatcacaagcaatcttaaatatcgaatccaaattttacattgttcgacatgcagtttggtgatcgtgcagtgtgtatttgtctttaaaatgtttcgcttaatgataatgacaacgctagaaacgatatcactttagggggttaagcgtacgtttaatataaatagctcaataaattaaatattcgttcacaggggggactccttttggctcaatcaaaaaatgaattttatctaagacgtattcactcgttattaggtattatcccaataggtgcatttttggtcgttcatttattagtgaatcaccaagcaacacaaggtgctgaagcgtttaataaggcatctaactttatggaatcattaccatttctaattattgtagaatttttatttatatacattccgttgttatatcacggtttgtttggtatacacattgcatttacagcaaaagaaaatgttggacattactcgatttttagaaactggatgttcttcttccaaagagtgagtggtatcttaacatttatctttattggtatccatttatggcaaacacgtttacaaaaagcattttacggcaaagaagtgaattacgatttaatgcacgaaacattgcaacatcctggatgggcaatattttatattatttgtattattgctgttgtgttccactttgcaaatggcttatggtcattcttagttacttggggaggactacaatctccaaaatcacaacgagtatttacatgggtttcattaatcgtattcttagttatttcgtatattggtgttactgcaattattgcctttatgtaatacatcgcatttaacaaaaatagattgaaaatttaggggagtgacatttttatggcagagaaacatcttattgttgtcggaggtggcctagcgggcttaatgtcaacaattaaagcggcagaaaaaggtgcacatgtagatttattctcggttgtaccagtaaaacgttcgcactctgtttgtgcccaaggtggcattaatggtgcggtcaatactaaaggggaaggcgattctccttggattcactttgatgatacagtgtatggtggcgacttccttgcaaaccaaccacctgttaaagcgatgacagaggcagcacctaaaattattcatttattagaccgtatgggcgtaatgttcaatagaacaaatgaaggtctattagattttagacgtttcggtggtacattacaccacagaacagcatatgcaggggcaacaactggacaacaattattatatgcattggatgaacaagttcgtgcatatgaagtagatggattagttacgaagtatgaaggatgggaattccttggcatagttaaaggtgatgatgatagtgcaagaggtatcgttgcacaaaatatgacaactgctgagattgaaacatttggttcagatgcagttattatggcaacgggtggccctggtattattttcggtaaaacaacaaactcaatgattaatacaggatcagcggcttccattgtttaccaacaaggcgctatttatgctaatggtgagttcattcaaattcatcctactgcaatccctggtgatgataaacttcgactaatgagtgaatcagcacgtggtgaaggtggacgaatttggacatataaagatggtaagccttggtacttcttagaagagaaatatcctgattatggtaacttagtgcctcgtgatatcgcaacgcgtgaaattttcgatgtatgtattaatcaaaaattaggtattaatggcgaaaacatggtatatcttgatttgtcacataaagatccacatgagttagatgtaaaactaggtggtatcattgaaatttatgaaaaattcactggtgatgacccacgcaaagtaccaatgaagattttcccagctgtccactattcaatgggtggtctatatgtagattatgatcaaatgacaaatattaaagggttatttgcagctggagaatgtgacttctctcaacatggtggtaaccgcttaggtgccaattcattgttatcagcgatttatggtggtacagtagcaggtccaaacgcgattgattatatttcaaatattgatcgatcatatactgatatggacgaaagtatttttgaaaaacgtaaagctgaagagcaagaacgttttgataaattattagctatgcgcggtacagaaaatgcatataaattacaccgtgaacttggtgaaattatgacagcaaatgtaactgttgttcgtgaaaatgaaaaactgttagaaacagataaaaagattgttgaattgatgaaacgttatgaagatattgacatggaagatactcaaacttggagtaaccaagcggtattctttactcgtcaattatggaacatgttagtacttgcacgtgtgattacgattggggcatataatcgtaatgaatcacgtggcgcccattataaaccagaattcccagagcgtaatgacgaagagtggttaaaaacaacaatggcctcattccaaggtgcatttgaaaaaccacagtttacttatgatgacgtcgatgtgagtttaataccacctcgtaaacgtgattacacaagtaagtctaaagggggtaaaaaataatgactgaccaaccagtaaaagacacgccacaacatgaaacgcaatctaaaacgaagcaaaaaacagtgaaattaattattaaacgtcaagatacaagtgactcaaaaccatatgaagaaacgtttgaaattccatatcgtgaaaatttaaacgtcattgcatgtttaatggaaattagacgtaacccagttaatattaaaggtgaaaaaacaacacctgttgtctgggatatgaactgcttagaagaagtatgtggagcatgttctatggttatcaatggtcgtgcaagacaatcttgttctgcgattgttgatcaattagaacaacctattcgtttagagccaatgaatactttcccagttatccgtgacttacaagttgatcgttctagaatgttcgataacttaaaacgtatgaaagcatggatcccaattgatggaacgtatgatttaggtccgggaccacgtatgccagagaaaaaacgtcaaacagcttatgaattatctaaatgtatgacatgtggtgtgtgtttagaggtttgtcctaatgttactgaaaaaaataaattcgttggtgcgcaagcaatctcgcaagttcgtttgtttaatttgcacccaacaggatctatgactaaagatgaacgtttaaatgcattaatgggtacaggtggcttacagcagtgtggtaattcacaaaactgtgttaatgcttgccctaaaggtattccattaacaacatccattgcagcaatgaacagagaaacaacattccacatgtttaaatcattctttggttcagaccatgaagtagaataaaaattaatcccttttgagttaaaatgttatgttcctttcaaaattaaattgaatggagatacacaaaaacttagaagggatatttttatagttacattacatgacaatatgatagtgagctaatttaaaataagtattatattataatgacaaaaatagtaaacacagtgcataatactaaaatcaattgcttagttatgataaactaaaaattaaattaaaagtaaggatgaccgaatatgaataaaccaataggtgtaatagactctggtgtcggaggtttgacagtagctaaagaaattatgcgtcagttgccaaatgagacgatttattacttaggtgatattgggcgatgtccatatgggccaagaccaggagaacaagtaaaacaatatacagttgaaatcgctcgtaaattaatggaatttgatataaaaatgctcgtgattgcttgtaatactgcaactgctgtagctttagaatatttacaaaagaccttatcaatcccagtgattggcgtaattgaaccaggtgctagaacagcaataatgacgactagaaatcaaaatgtattagtactaggaacggaaggcacaattaaatctgaagcatatcgtacgcatattaaacgtataaatccacatgtagaggtacatggcgttgcctgtccaggttttgtgccacttgtagaacaaatgagatatagtgatccaacaattacaagcattgttattcatcaaacactgaaacgttggcgtaatagtgagtctgatactgtcattttaggatgtacccactatccattgctctataaacctatctatgattattttggtggcaaaaagacagtgatttcgtcaggattagaaacagctcgtgaagttagtgcattgctaacatttagtaatgaacatgcaagttatactgaacatccagatcatcgattttttgcaacaggtgataccacacatattactaacattatcaaagagtggctaaatttatctgtcaatgtggaacgtatatcagtgaatgactaggaggatttttaatgaaagagattgttattgcatcgaataatcaaggaaaaataaatgattttaaagtgatatttcccgactatcatgttataggcatttcagaattgatacctgattttgatgtagaagagacaggtgttacattcgaagaaaatgcgaaattaaaatcagaagctgctgcaaaagcattgaataaaacggtcatagctgatgacagtggactagaagtttttgcattaaatggtgagccaggtatatactctgcacgttacgctggtgaaaataaaagcgatgaagcaaatattgaaaaattattaaataagcttggtaatacaactgatcgtcgtgcgcaatttgtttgtgtcataagtatgagtggccctgatatggaaactaaggtatttaaaggtacggtttcaggtgaaattgcagatggaaaatatggtgaaaatggtttcggatatgatccgatattttatgtaccgaaattagatagaaccatggcgcaactttctaaagaacaaaaaggtcaaattagccatagacgaaatgcaattaatttattagaagcttatcttgcgggtgatcaaaatgtctaaatggattgttgtgagtgataatcatactgaatctggcattttataccaaatttacgaggcacacccagatgctgatatgtatttgcatttaggcgattcagaatttgagtatgatgatacagaacttagcttatttcgtagggtaaaaggcaattgtgatttttacccagaatttgaaaatgaagcggtcgcaaaatgtaatgatgtgaaagcattttacactcatggacatttatatcaagtcaatcgaacaagacatttattagctgagcaagcacgtgaattaggttgtttgtttgcattttatggacatacacatgtggcaaaatatgagtatattaatggtgttcatgttattaatcctggaagtatatctcaatctagaagttcaatggaagaaacatatgctgaagttattattgatgatcaaactttacatggcaccatcaatttcaaaaatcgacatcacgaaacaataagtcatactactttttaaatagaaagtagctatggctttttttaatttatagactgatttaactaggaggtcgtgacatgaatgtttgtttaaaagtatttctgacaatttttagaaggtaactggaatgaataatacatttatgtaatgaaaagaattgtaattttggggaatgtgattgttgatggtcctatatggttgaatcatgttgattatttggttaaaagtgtaatattaaaaagtataaaattaatattccaagaagtcaggaaatttgaaattttatttaaaatcatgaatcgtatacatatttaaaaggatttctaaaggcataaattatatcaataatttgatggttaaaatatggagtagcaaaattcttgaaattcagaaatgtagtgacacaaatattaatgtttagttaataaatagttaatgtagttttttgtatctgtctattattataaatatatacaaaataaatatttgaggataggtgttattaattatgaaaaagaattttattgggaaatcaattttaagcatagctgctattagtttaacggtatcaacgtttgctggtgaatctcatgcacaaactaaaaacgttgaagctgctaaaaaatatgatcagtatcaaacaaactttaaaaaacaagtaaataaaaaagttgtggatgcacaaaaagctgtaaacttgttcaaacgtacaagaactgttgcaacacaccgtaaagcacaaagagctgttaacttaattcatttccaacacagctatgaaaagaaaaaattacaaagacaaatcgatctagttttaaaatataatactttaaaataattgatagaagccatgctatagagtgtggcttttttactatgtgtaatctgatgaaagttatttaaacattgtatatattttacttgatgagtatattggggtaaatcttagaaaatcctttgaaaatgtatgtgataggtgttttgaatgacgggataacgccaagcatatgtattaacaatcgttagaattttcgcggatttagaggtattgtattaatcatacgtgctttattaaacagtcgtaaagatgctaaataaattggaagttacttaatataaaaaagcacgccaaaacgttagcattgttttccaacgtttagcgtgcaactatttaattcagtgtgtttattgatcccaagtaattgactcgatttcgccgtcagcgactactttaatattttttctattcttttctaatgggtgagtaagatcaaatgtataataaccgttagaaccaccatctttgattttaacgactgctttcttcacatcgccttggcttaattttttgacgatgagataaagatcattaacagtttcacctttgtaaggtttttgatttttatcagcttctttcattaacttatcaatacgttcatcatcttttttagcttcatctgctaattttttagctatttctaaacctttccattcataactaaagaaagctttagcatcatttgaatgagttagaagacctgtagcgatgactgtagatgcaataattacttttgtaatattttttttcataataagttctccctgtaaaataaatttgtacttaatgttgcgagtacactgctattttacaaacggtttcatgcttttaccacttaacacttcattaattaaaattaagtgcaaattaataaggtttaatacaatcgaaaaagaaaaatgatgaatttgatgttattattttgtataaaatcattattaaacatcatgttagttttttatggtaagtaaacatgattcaacaataacgatattatatttttaacgaaaataaaatgtattgtccctaatctaattttttgaacttgaaattgtcaaatagaataaattgatatgtttgtagctgttccgaaatatcattttttttaaaactaagacatgtcgtatagtggagaaataataactatgtataattttacttatatagaaataagagatatattctaaatatcgttgatatgttatgattaatatataagttaaaaatcatactatttagttgcattatgcatttacgaagtaagcacaataaagcatatacattttcaaacagcataaaatgttgtaatagcacgtgccatgatgactaaagcataggcattacgtatcattggcaatcacatatgtggttgttattttttcgtgttaattaataaagataaaaataaatactttgaggtctcacgttgataattaaaattttaacaattctatttctactttgtatattgagttatttggttacaaacagaaagaagcctttcttgtttttaaaaacactcttgatgggtgtcgtattcatattcattggatatatttcgttagctatctctgcagttatcatttatggaatagctcaatttattaccattgattttggtagctttttcttaatggggattattttaattttgatttcaagtatattccaattatttatagttagattactgtttcgaaaaaagaatgtcgatttgacagaggttgtcgttttagaacatttaattcaatggttcttagtttactttgcgatatatcaagcagtaaatgaaaaaatggatattaatgatattaatatcgacaatttccaatctgtattttttgacgtatctaatttgaacttagttatactgccaacgttgattattagctgggttacaatatttaactatagaatgagaagttacaaataaatttaatgacattatacaaaaagacaccaacattcaagtggtgtcttttttgttgtgtggctttatttttgaaattcgaaaaagtagaggcatgaattttttgactagtgtataagtgctgatgaaacacaagatagataactatattttgtctatattataaagtgtttatagttaattaatattcagttaattttaaaagttgtataaataggataacttaataattataagacaacaatttggaggataattaacatgaaaaataaattaatagcaaaatcattattaggtatagcggtaattggtatgactgcaacaacacttgcatcaactgctgatgcgagcgaaggatacggtccaagagaaaagaaaccagtgagtattaatcacaatatcgtagagtacaatgatggtacttttaagtatcaatcaagaccaaaatttaatacaacacctcaatatattaagtttagacatgattataacattgtggaatataatgacggtacatttggatatggtccacgtccgcattttaataaaccagctgaaaaatctgatgcgacaataaaaaaagaacaaaaattgattcaagcccaaaatctagtgaaagaatttgaaaagacccatactgtaagcgcacatagaaaagcacaaaaggcagtcaacctagtatcatttgaatacaatgttaagaaaatgatattgcaagagcgaattgatcaagtattaaagcaaggattagtgagataatacttctgtcattactgtaagttcaaaatcatttaatttaatattaatttctattaataaaaatactatggtatttaatagtgggttaatgtaactttcctaaaattgactatataatcattaagtatcaatttttaaaggagaatttacaatgaaatttaaaaaatatatagtagcaggaacattagcagtactattatcaacaacagcagtatcaacattagatgggaacaaagcagatgcaagtagtcatgacaattatttaactcaaagtaaatatcatgataaaaaaattgctgaagaattgaaatcattacttagacaatcgaacgtatatgacttggctgcaggtagcttaaatcgatattacaaacgtacgattatgatgaatgaatatagagcaaaagcagcactaaagaaaaatgatttcaaatcaatggctgaagctaaagtagcattagaaaatatttacaaagaaattgatgaaattataaatagataataaaaaacaggctgagacaataataccattgtcttcgcctgttttttttgcagatgaaaattctgcaatttaatatttatgtatgagcaatgtatacaaaaaataggggagacaaatataaatataatagttagaaatgttatgcacaaaattgctttgtacaatctaaaaaatatttatagtgctcccatagataaatttaaacgtagtatgaaacgttctgatttttactcaatgagtttattattggaagaaaaagttaacgtgtgtcgaacatgccacgatgccaaatataatgaatagaaataagacaataagcatggcggcgctttttaaacaacctctatttgtttcctccgaatttctttgttgaacctttttataatcttcaagatgctttgtggtctttttatttatatgtttattcatgatgtttactccttaatctaaatgtaaattgcattaaaatagttgaaaacattacctgaaataaagatataaagcttaagttaggctgctcgttgtttcaaattttaagtgagtatcatgttaaattagatgataacttgtttcgtttattttccaaattgttcgcttttaaactgacgtattaaaatattaatgaaacattagaatacataaatgaacagtaaaggtgcacagtatagaaggattaatgccacactaagtataaatattgttagctgtaaactatctttagttttaatataaacaattaatataagtagtgttaaaaggatcatatatattaatgacgaagaagtccaaacaaaatctgcgtcattggtagttagcaatgggacgataatcagtccgaagttaatcatgcatgctatatatacaatgatgttatacacaatgttaatttttggtcaccaccttaactgttgtttttaaatgctttgaaaattgcattttaatagtgtaatgaatatccgaatttctaattttcgttcgttatacttttaaaagactatatatagtatgcttttatgtttctaaatgttttttaatatttaattatcgtcaatatttggattatgaatcatcaactcaagtactttgttagatgcgtcaattgtaaattcagagccatagttaacatgactaacttttaatttattatctaaataattgattgcgattgcgacatcataatcttcatcaataacaaataaactattttcgtttgtaactacttcatgtttccctgagtaaacaacattaatttcccaatctttaaaaaccatttgtcatcctccttgaacatttaaactgattcaatctaagtttaacttattcatacaacttcttacaatatctagattagagataaatagatttctagaaattattttcaattatatgtacttattatactttttatcttcttatttcagtatagttttaaaacgattttaaaataattctgcaaatatattaacacataatgtgttcaataagttttgaacaatttcaaaacttttaattaaagggtttgacaacatgaatttcaaatgtttgaagttaagaaatcagtaccgtaatcatgattttagccgtaaatatatacggaaaagcataataggtatattactattcatcgatgttaaattttatactgcaattaaaatagccgacgcacatcatttctgatgttatcggctaatattattatgtgactatttgagtgtacataaccattaatttgtcatttcttctttttcccaatcgattttatatctttcagaagaacgatctgtccatttatctttagtattggtacctttccaatttgttgaagtccaatgtagttgatagtcatcacgaacacgttcatatattacatctatatttgtttgttgtttggttgcttttctatccatggtaataactgtagcgaagtctggtgaaaaccctgaagataatagagaacttgctttgttaggatcaaggaagttatctgcagctttcatagaaccgtttcttgttttcatgaaaagttgattgccatatactgggttccaagaatctctgtcatatggtccccaattttgattcaccatattgttaaatataactttccaacctacttttttatcagttggactttctaaaattgttttgaaatctggttgaacatatttgagtgtatgaccaattgaaacatttgcaccaatcaaaccgccaatttttccagaatcatcaccagtcacgttaccgttgaatccataagttaatgtactcatatattctttagtatcaattgaatttctagggtagtaatcagaaatttgtgctacttcattatcaggtagttgcaattgtaccttaaatgctgaaggccaggctaaaccgcttttattagcgccttcttcgctataaactctatactgaccagcaatggtacctttcgttctgatgactaatatttttttattgtgatttttatcatcgataaaactataaaatacttttttgtgcatgccattttctttatcataagtgactaaatcacctgtttttactgtagtattgcttcctatatctgtagtaccggttttaatattaatatcagaatctgcggcattagcgacaggattcattaatatagaacctagcaatagtgttgttgttactgagctgactatacgtgttttcattttcatcatccttctattttttaaaacgatttgaggaaacaataatcaatatgtcaatttagaataatgcagttgagacatatcaaatatttatcatcgtttatattagtatatttaatgtagcaactgttaaatgattgagtgatgatgagtgaatattttaagaatatgtttttaacttttaattaatatttgaaaggaagcatttcaatgtcgaggcttagtcaaagttgaatgaactctttatgaaccaaggaaaagacaaagctaattttattgattaatttctttaaaactgggtatttatttaactttaaaatgtaatcgattacaatataaaaatacaaatatcttagaattaaatcaattaattaactattaaataaaagttaactgtatattaactagtataattaatcaattatgaatagagaaaaaataattgtcttggaatatttgtgcgaattaattttaacaaagtattgtaatttcgtataaaaatgtaaaagggtgtagtgtaatattataaaacattgtaaaatatgttatacaaggaaaaatgtagacatctagttataggagttataagagaatcttaaacttaggttagcttttaatgttgaaaccaagtggaaagtgataaatgtaaaagtgataggggattataatgaaactattttatatcgcatttctaattattttatggctgaatatatttttaggaaatgaagtcattcatacactgactgttttaataacaacattgtatatcgttaatagaagaaagagggttaaaaatgacacagttgaatgaaattatcaacgctattcagtctttgtttgagtctgaatcaggctacaaaatatcgaaaaattcaggggtgccgtatcagaccgtacaagatttgaggaacggtaaaacgaaaatagaagatgctagatttagaacgattataaaactatatagttattatacttcattaaaagagcagtcatcattgaatcattaaattaagagtagagcctaagacgtaaccacgacttaggctctacaatattatatagacagacattgaccaaacaaaaatgcccatgtaacaaacatttttcaattatgggcggggccccaacacagaagctgacgaaaagtcagcttacaataatgtgagagttggggcggggccccaacacagagaatgatttggcatttctgattgactccaaatgccattttatattttgtagactaattttttattgcgtatatattgttgatacatgtcgaagtatcattactatattgtttatccttggaatttgcaatacaagtcatgcaatatcatttaatcgatgaggacctcgactgttattttttgaggatttttaacataaacatttgcaagatcagaatgtaatcttttgctcaaatcaattgtatagtcattgccgccaccggtaattttaagcttacctttattgcgattttcatgatataatattttatttttaattagcgcttctcgtgctcgaaaatcaatttctttcaacgttaatattggtttattaccttggtacatcttatgtgcaccaataattgtttgtagtttatctttgtattggacaaaaagactatatggtttatcagaagatgatgcagcaggtgttacaccacctgtaaatgtatcacgatatacccaccataactggctagtgtcttcgtcttttaaaccaaatacgtctacatagcggtctcttaattgattaatgttgccccaactttcggcaccccataatcgtatatgagctgaccaagaataacgcttaaattcaacataaatgttgccgtcatcatattggtataaccatctatttgaaaatgtcagaggcttttgtgtgtaatatttaattaactcattgatgttcgtttcgttttggtcaatataataagctttagcgtcagtagaaacatttagtggcgaattagggatttgtgtagctgttgttcctaataataacaatgttgtcattaaaattagttttttaatattgctctttctcattcgaacttctcctttctgcgtattcatcaatatgaggattaacaaatataaaaatgaacggtgtcaatgtaaccatagtgcttatttctgtttgctccgatttcgatgttagttagatttttcaaggaggatttcgatgtgtgcagtttgagggtttttaacatatctatttgcatcagttgattttaatcttttgtttaaatctattgtatagttgttgctgccacctgtaatcttaatgtggcctttattataattaccatgatataattttttgtttttaattaatgtttgacggattcggaaatcaacttcttttaaagttaatacgggtttattacctgtgtaaaatggatgttcgccaataaatgttcctgatttatctttatatgttaggttcaatttataatgtttatcgctaggtttcgctgctggtgtaacaccaccagtaaatgtttcttgagctaacatataagtgtgccaagtttcataatcttttaaagcaaaaatatctacatatttatttcttaattgattaatattaccccaactttcaggaccgaacacttgaatatgactaaaccatgataactgtaacaatgttgcatggattgtaccattttccttttgccacaaccatttatttgaaaaagttaaatggcgttgtgtgtaatatttagtcaattcacttacatttgtttcctcttggtcaatataataagcttttgcattagatgacatactaataggtgagtgtggggattgaattgtagctgtgcctatcatagtcaatgctattgataaaatgattttttttgtgaggttgtttttcattagaaaatctcctttacgaggaatgttatatacgaggaataataagtttataaaaagagagaaatcaattaaatcattcagtctatttgtattcactcaatgaatgatactaacgagatttttcaagaatgacttcaatttctgtatttcgaggatttttaacataacgatttgtgtcagttaattttaatttcttacttaaatcgatcgtataattattaccaccacctgtaattttaatttgacctttattaaattctccgttatatagttttttgttcttaattaaagtttgacgaacgcggaaatccagttcttttaaagttattactggtttgttaccttggtaaaactcaagtccaccaatcatagtttgtagtttatctctatattttaaagataatttataatgcttatcagatgaagtggcggctggtgtaacaccaccagtaaatgtttcatcataagtccaataaccttccactgtatcctcgtctttagttccaaatatatctacatatttatctcttaattgattaatgtttccccaactttcagggccgaatacttgaatatgcgtataccaaacccacgtttgtaatgttgcatgaatggtaccattaggtttttgccacaaccattttccggatagtgataaatgaggctgtgtataatactttattaactcattgatattagtctcgttttcactaatattataggcttttgcttcagatgaaaaactgattggtgttttaggaagttgtgttgatgtagttcctaaaagtaacaatgctgttgataaaactaatttattcatgatgttctttttcatatgaaaatctcctttgcgtgaattacccaaagtatataagctatcacaccgattcggaattaaataaaagctaaaactatgttaaataaacttaaacggctagtagtgttatttaagcaaaacttatcatttttaagttttggacagaaacagtacctaataaagtaggcgggagttatatattaaaaacgacacgttagaattattccataatcaattgcattaaattgtttgataattgaattttctaactacttgaaaaatagttatactttaaatgtagtacttattttaataatttcctactacttaaatttaatattaataaaatgttcatttaattattgataaaatattacaaattttaatagtaggttgtgtttattttgtatgcgcttacaatttaggtgtaactaaaataaaaggagttgttattaatgaaaaatttacgaaacagaagttttttaactttattagacttttcacgacaagaggtagaattcttattaacactctccgaggatttaaaacgtgctaaatatattggcactgaaaagcctatgttaaaaaataaaaatattgcactgttatttgaaaaagattctacaagaacgcgatgtgcatttgaagttgcagcgcatgatcaaggtgctaatgtaacttatttaggcccaactggatcacaaatgggtaaaaaagaaacaactaaagatactgcacgtgtgcttggtggaatgtatgatggcattgaataccgtggtttttcacaaagaacagtagaaactttagctgaatattcaggcgtaccagtgtggaatggtttaactgatgaagatcatcctactcaagttcttgctgatttcttaacagcaaaagaagttttaaaaaaagattatgcagatattaactttacatatgttggagatggacgtaataacgttgcaaatgcattaatgcaaggtgctgccattatgggtatgaacttccatttagtttgtccaaaagaattaaatccaacagatgaattattaaatcgctgtaaaaatattgccgctgaaaatggtggcaacatattaatcacagatgatattgaccaaggtgtaaagggttcggatgtaatttacactgacgtttgggtatcaatgggtgaacctgatgaagtatggaaagaacgacttgaattattgaaaccttatcaagtaaataaagaaatgatggataaaactggtaatccaaatgttatttttgagcattgcttaccatctttccacaatgctgatacgaaaattggacaacaaatttttgaaaaatatggtattcgagaaatggaagttacagatgaagtattcgaaagtaaagcttcagttgtattccaagaagctgagaacagaatgcatacaatcaaagcagtcatggttgctacattgggtgaattttaaatgatataaggaagtgaatatgatggcgaaaatagtagtagcattaggtggtaatgctttaggtaaatcacctcaagaacaactcgagcttgttaaaaatactgcgaaatcattagtaggattaataacaaaaggacatgagattgttattagtcatggtaatgggccacaggttggaagcattaatttgggacttaactatgctgcagaacacaaccaaggtccggcatttccatttgctgaatgtggcgcaatgagtcaagcttacatcggctatcaattacaagaaagcttacaaaacgaattgcattctattggaatggataaacaagtggtaacgctagtgacacaagttgaagttgatgaaaatgatccggcatttaacaatccttcaaaaccaattgggttattttacaacaaagaagaagctgaacaaattcaaaaagaaaaaggatttacatttgttgaagatgctggaagagggtatagacgtgttgttccttcaccacaacccatctctattattgaattagagagtattaaaacacttattaaaaatgatacactcgttattgctgctggtggtggagggataccagtaattagagagcaacatgatggttttaaaggtattgatgcagttatagacaaagataaaacaagtgcgttgttgggcgctaatattcaatgcgatcaattgattattttaacagcaattgattatgtatatattaattttaacactgaaaaccaacagcctttgaaaacaacaaatgttgatgaattaaaacgatatatagacgaaaatcaatttgcaaaaggaagtatgttaccaaaaattgaagcagccatatcatttattgaaaacaatccaaaaggaagtgtgcttataacatcattaaatgaattagatgctgccttagagggtaaagtaggtactgtgattaaaaagtaattgaattgaaacgcttttcaattactatatgtcaaatgcatgatttttattatttatgtgcacccctgaaaataatgcctctattttgatgcggggtgcactttcttaatttatatttataaaatctttaaggtagaaatgctaggttaaatgtcgaaggagatgaaaccgtggaaaatacaattaatgaaagtgaaaagaaaaagcgatttaaattaaaaatgccaggtgcatttatgattttattcattttaacggttgttgcagttatagcaacatggattattcctgctggtgcatattctaaactttcttacgaaccttcatcccaagaactaaagatagttaaccctcataaccaagtgaaaaaggttccaggtacgcaacaggaattagacaaaatgggggttaaaattaagattgaacaatttaaatcaggtgcaattaataagccggtatcaattccggatacttatgaaagattaaagcaacatccagctggaccagaacaaataacaagtagcatggttgaaggtacgatagaagcggtcgatatcatggtattcattcttgtattagggggacttattggcgtagttcaagccagtggttcttttgaatcgggattgctagctttaactaagaaaacaaaagggcatgaatttatgctaattgtgtttgtatcaatactaatgattatcggcgggacgttgtgtggtattgaagaagaagctgtagcattctatccgattttagtccctatatttatagcgttaggatacgattctatcgtttcagttggtgccatattccttgccagctctgtcggtagtacattttcaactattaacccgttctcggttgtaattgcctctaatgctgctggtacaacttttacggatgggttgtattggagaataggtgcttgtattgtcggtgcgatttttgttattagttatttatattggtactgtaaaaaaattaaaaaagatcctaaagcatcatattcttatgaagacaaagatgcttttgaacagcaatggtctgtattaaaagatgacgatagtgcccattttactttgcgtaagaagataatccttacattatttgtactaccatttccaattatggtatggggagttatgacgcaaggttggtggttcccagttatggcttcagcatttttaatatttacaattataataatgtttattgctgggacaggtaaatctggattgggagaaaaaggaactgtagatgcatttgtcaatggcgcatcaagtttagtaggtgtatctttaattattggcttagctcgaggtattaatttagtgttgaatgaaggtatgatttcagatacgatcttacacttttcatcatctttagttcaacatatgagtggaccattatttatcatcgtattactatttatattcttctgtttaggttttatcgtgccatcatcttctggcttagcggtattatcaatgcctatctttgcaccactagctgatacagtaggtataccaagattcgtcatcgttacgacatatcaatttggtcaatatgcgatgttattcttagcgccgactggacttgttatggctacacttcaaatgttaaacatgcgatattcacattggttccgatttgtatggccggtagttgcttttgtattgattttcggtggcggagtactaattacgcaagtactaatttattcataatttgaaatgctatattataaaaaatactaactggattttatgcatctcgtaggtttgtagaaatactaaactaagcgaggtgcattattatctttgattaacaaaataatggcgttaatgacaacactagtaagtaattgatacaatgttctatttaataatgatatttttaaaatttgtttttaatgtaatgttagatctatggtatattatatttatcgtggtaaatatggtgtttgctgtaaacagtttttgtaacacatgacgcatatggttgtgaaaatagcatatataaaggatggctataaatgacacatttgacaaaggttttagatacactaactgggatatgcgtagtattattatttagtaaatattttgtggcgtatgcaaatatggtatttgattggaatttaagatggtatttgctagaaaacataccacatttgccaattatattatttattctgatgtttattttcggagtaccttctgaaatgataaaagataggcaaaggaaaaataacggtgtttaatttatcgatatttagaggtgataaaatttgtcaactattacaaagactaaaataaaaatctttattaattattttattggtatattagccttggcgtttgctgcttatatattatttaaataaagcttagagtgaaacgtgtttatgaactagatgttctagtatagttactacagctttagtcagaaggtatcattgttgttcatacataagatgatattaaatcaaaaaggcattgatatacactaaaaagaggcaagattagctgcctcttttttagttattaaatatgcgtgttaattcttggtattagtgttactgagacgcattacgaagaaatttatcttgattttccttttttaaaaagaagtgaagatatcctataaagactctaagtactattacagtggctaataacatttcgataaacaaaagacctttccaaatgactggaaacataagtacaggcaaactgttctttaaagcagttgcagagattactaaagggaatgtgaaagctgaaaatactggcgaaaaaggttcttttagtaatttaggcaattgtataatgatgtaaaaataaaatatttgagctaatagtaaaagtataattacgataaaagtattcgccttaggaaaggctataacatatgctgcagcgactaaagaaaatggtgcacaaattgtcgatgtgtttggtttgattgacgtctgcaatggaaatgcttttaatcgcttgaaaactataggtaagacaatacaagtagctacaaagccatatattactgttaattgacctatgaaaaaatatccgctgacgggtgccgtcaatcctgcgatagcaattccaataaaaagtacagtccatgatggataaacattctcaagtgaaaaatcttttaaatatttgattgaaaaaataatcatatgcgtcataattcccacaaggcataaaatccaaataggcgttattaaattattgataaatgtgatgttactaaaaaatgtatttaaataagtagtacctaaaaagccggacatgaaaaatgttgtgaacactgatgaaacaagagggctgtttaattgttctttcacattattaaaatatttgagcatagtacataaaaggtgaatccaaatcaagaaagcaaagattccgcaaacagcgtttaaactaagagataagtcttttaatagattgcccaggcctaataatcctaagactagtcctgacgttacaagaggtgctttttgaagtctcatgatttacaacctttcttatgtgattttcttcactaattatatcatgatagctatggcctattaataagaagagtgtgtactattacgtttttagagtatgtataatggattgatagacacataattgacatttaaatctcaaaattaatgattcttgagtatgctttgcaacctaaatattggaatatgtggaaaagtaattatttaatttaaataatgattgaagatttacaagggggtacaaaatgagaaatcaaattcaaaaactattagacagtgatttgagcagtttacatatatcaaaacaaacaggagtgccacaaagcacaatacacagaatgagaaaaaatgaaagatcattagacaatatgtcattgaaaaacgctgaactactttataaatttgccaatggtatatttagtgatgaaaattaagaagaataattagtgaattaaataattagaaaaccacgtctcgatggacgtggttatttttacatgtatataattatagaatttcgggtccctgaaaagtccctaaaattttgaatagtatcaaaatctataggaataatataataataaaaatttctacgcatacaaatggtgagtgataaaaatcttggtgtagttttggtgtagttcaggtgcagtatagatgaaattttagcgcaaaattacttaattaaaaatgtgtaaacaagtgtcagacgcgtgtcaattgtgtgtcaaaaaaattctataacgaatatgcgtgcttgttttaatcactgtattttctggggttatgcggggacgttttggtgacgcatcatactatattactgaaattcaaaacaaaaagagccccgtaatcacggaactcttttgtttagtaatgcgtataaaaatactataaacgtcctgggagggattcgaacccccgaccgatggcttagaaggccattgctctatccagctgagctaccaggacacgtttaacaacacaagaattattatatctaaatgaacttaaattagcaataccttgtaaataaaaaaagtttatatttttcactattatagagctatttatctaaaaaggttcaataagacttaaatacgaatttaggcaacttaattgtgttaaatacagttttgaatgcctaactgtatatcttttctctttaaaatacagttaagtacattataagatgttgtgcggataaacaaactaattgcatcaaatttattttaaaataacaacaacaaaacgttaagcgaataacatttcggtgatttaaaagctacgcacgtttttgttatcttcaaatttaaattttaaggagtgttttcaatggaaggtttatttaacgcaattaaagataccgtaactgcagcaattaataatgacggcgcaaaattaggcacaagcattgtgagcatcgttgaaaatggcgtaggtttactaggtaaattattcgggttctaatttcaatatgttatgtaagtaataagtattatttcaaaggtgagggagagatttaaatgactggactagcagaagcaatcgcaaatactgtgcaagctgcacaacaacatgatagtgtgaagttaggcacaagtatcgtagacatcgttgctaacggtgtgggtttactaggtaaattattcggattctaatataattattaatattctttaaaataaactgggtgagcatactttaatgttatgcactcagtttattttatttgcagaaatttgagcctctgttaagatttagatacatagacaatataggaggtgaggaaattgggatataaaaatattttgatagactttgatgatacaattgttgatttttatgatgcagaagaatgggcgtttcactatatggcgaatgtttttaatcataaagcaacaaaggatgattttttaacatttaaaaaaatcaatcaccaacattgggaagcttttcaacaaaataaattatcgaagtctgaagtattatcagaacgatttgtgaattacttcaaacatcatcaaatggaagttgatgggcatcgtgcagatgtgttatttagaaatggattagcagaagctaaagttaaatactttgatcaaacattagaaacaattgtcgagttatcgaaaagacatgatctatatattgttactaatggtgtaaccgaaacgcaaaagagaaggttaaatcagacgccgttgcataaatatattaaaaagatatttatatctgaagaaacaggatatcaaaaacctaatccggaattttttaattatgtttttaatgatattggtgaggatgaaagacagcgctcgattatagttggagattctttaacatctgacattctaggtggaatcaatgcgggtatagctacttgctggtttaattttagaggatttgatcataatccaggaattatacctgattatgaaattaattcatggaaacaattaaatgatattgtacgttaagacaaataatttgaaaatgatttacttatattagctacgaaagtaattgtaaaaaagacactacgaaaagatgcattttcatgctcgtagtgtcgaatattattatcttatggtttccacaataagacatcatgtccttctatatttttagcttccacatctgtaaatccatgatgtaaaaagaaatccttagaatcatttctgccaatggctttaattggcatattgaaactctttgcaaaatcaatcaattctgaagcgtaccctctgttttgatattttggcaatacttctaacttccataataatatataatcttcaaaatctgggaagtagatttcttcgacatcccctttttttagtaatgccattctagctcctaattgatctccgacaaatatgccataaaaaggtgaatctgaacttgcatcaatcatttgaccgtttaactcattgaccatgtataagtctttgttgccaaacgctctaaagttttcgaataattcgtcagttttgtaatttatttcaagacgtttgatttcactcatatttatctaccccttatttgtttactactattattatacattaaaccacttgtgtttttcattgatttgaaaatgtaaaacaatgaatattataaattttccatgattaaattgattttcaagccgtaaaattgtcaatcaccggtatagactttatactatagtttgtaatcgcgtacttaaggagaaaaaacatggactgtaaagtagttagtttaaatgaaaaagatcagtttataccaaaaataaagagcagtgatcctgtaataacaggattatttcaatatgatgcagctcaacaaattagttttgaaaaaagaatgtctaaagaaaataatggaagagaagcggcattagcgaatgttattcgtgaatatatgagtgatttaaagctttctagtgaacaagaattaaacatacaacatttagctaatggttcaaaagttgtgattggtggacaacaagcagggcttttcgggggaccattgtatacattccataaaatattttcaatcattactttatctaaggaattaacggatacacataagcaacaagtagtacccgttttttggattgcaggagaagatcatgatttcgatgaagtgaatcatacatttgtttataacgaaaatcatgggtcactgcataaggttaaatatcatacaatggagatgccagagacgactgtctctagatattatcctgataaggctgagttgaaacaaactttaaaaacgatgttcattcatatgaaagaaactgttcatacacaaggtctactggaaatttgtgacagaattattgaccaatatgactcgtggactgatatgtttaaagcactactgcatgaaacatttaaagcatatggcgttctatttgtagatgcgcagtttgagccgttaagaaaaatggaagcgcctatgtttaaaaagattttgaaaaaacatcaattgcttgatgatgcatttagagcaacacaacaacgcactcaaaatcaaggtttgaaggcgatgatacaaacagatacaaatgttcatttattcttacatgatgaaaatttgcgtcaattagtttcgtatgatggtaagcattttaaattaaataaaacagataagacatttataaaggaagaaattataaatattgcggaaaatcaacctgaattattttctaataatgtagtgacaagaccattaatggaagaatggctatttaacacggtggcatttattggagggccgagtgaaattaagtactgggctgaactaaaagatgtatttgaactatttgatgttgaaatgcctatcgtgatgccaaggcttagaattacttatttaaatgaccgtattgaaaaattactttcgaaatacaatattccattagaaaaagtgttagtcgatggtgttgaaggagaaagaagtaagtttattagagaacaagcatcagatcaatttattgaaaaggtagaaggtatgatagaacaacagcgtcgtctataccaagacttattagatgaagtggcggggaatcaaaataatattaaccttgtgaataaaaataatgaaattcatatacaacagtatgattatttgttaaaacgttatcttttaaacattgaaagagaaaacgacatcagtatgaagcaatttagagaaattcaagaaacactccatccaatgggaggattacaagaaagaatatggaatccacttcaaattttgaatgattttgggacagatgtgttcaagccctccacctatccaccactttcttacacttttgatcatattattataaaaccttaatataccaagggtttagcccgatttatcttaatgataaatcgggcatttttttgttttttaaaataaatttcacaaattttgtataaatagtggtggatagtggggagatgtggtaaattatatataaggtgaggtgataaaaaatgttcatgggagaatacgatcatcaattagatacaaaaggacgtatgattataccgtccaagtttcgttatgacttaaatgagcgttttattatcacaagaggccttgataaatgtttattcggttacactctagacgaatggcaacagattgaagagaaaatgaaaaccttacctatgacaaaaaaagacgcacgtaagtttatgcgtatgttcttctctggagctgttgaagtagaacttgataagcaagggcgtattaacatccctcaaaacttgaggaaatacgctaatttaactaaagaatgtacagtaatcggtgtttcaaatcgtattgagatttgggatagagaaacttggaatgatttctatgaagaatctgaagaaagtttcgaagatattgctgaagatttaatagattttgatttttaaaatggaggaattgaagtgtttcatcatatcagcgttatgttaaacgaaaccattgattatttaaatgtaaaagaaaatggtgtgtacattgactgtacgctaggtggagcgggacatgccctttatttactaaatcaattaaatgacgacggaagattaatagcaatcgatcaagaccaaactgcaattgataatgctaaagaggtattaaaggatcatttgcacaaggtgacttttgttcatagcaacttccgtgaattaactcaaatattaaaagacttaaacattgaaaaagtagatggaatttattacgacttgggtgtttcaagcccacaactcgacattccagaacgaggattcagttatcaccatgacgcaacattagacatgcgtatggatcaaacacaagaactaacagcatatgaaattgttaacaattggtcatatgaagcgttagtgaagattttttatcgctatggcgaggagaaattttcaaaacagatagctcgtagaattgaagcacatcgcgaacaacaaccaataacaacaacattagaattagttgacattataaaagaaggtattcctgcaaaagcaagaagaaaaggcggacatcctgcaaaacgagtatttcaagcactacgaattgcagtaaacgatgaattgtcagcttttgaagattcaatagaacaagcgattgaattagtgaaagtagaaggcaggatttcggtaatcactttccattctttagaagatcgtttatgtaaacaggtgttccaagaatatgaaaaaggtccagaggtaccaagaggattaccagttataccagaagcatatacacctaagttaaagcgtgttaatcgtaaaccgattaccgctacagaagaagatttagatgacaataacagagcacgaagcgcgaaattacgtgtagctgaaatacttaaataaggagcaatttataatggctgtagaaaaagtgtaccaaccatatgacgaacaagtttataatagtataccgaagcaacaaccacaaactaagcccgaaaagaagactgtttcgagaaaagtggttgtacaattaactaaatttgaaaaagttttatacataactttgattactgtaattgctatgttaagtatttatatgctatctttaaaaatggatgcgtatgatacgcgaggaaagattgcagatttagattataaaatagataaacaatcaagtgaaaacagtgctttacaatctgaaatcaaaaagaattcttcttatgaacgcatatacgaaaaggctaagaaacaggggatgagccttgagaacgataatgtaaaggtagtgcgtagtaatggcgaagcaaaaaattaaaattaaaaaaaataaaataggggcagtcctacttgttggtttattcggactgctcttttttatattggttttaagaatttcatatatcatgattactggacattctaatggtcaagatttagtcatgaaggcaaatgaaaagtatttagttaagaatgcacaacaaccagaacgaggaaagatatatgatcgtaatggtaaagtgctagcagaagatgtagaaagatataaacttgttgcagtaatagataaaaaggcgagtgccaattctaaaaaaactaggcatgtagttgataaaaaagagactgcaaagaaattatctacagtcattgatatgaagccagaggaaattgaaaagagacttagtcaaaagaaagctttccaaattgaatttggacgcaaaggaacaaatttaacgtatcaggacaaattaaaaatagagaaaatgaatttgcctggtatttctttattgcctgaaacagaacgcttttatccaaatggcaattttgcatcacacttaattggtagagctcagaaaaatccggatactggtgaacttaaaggtgcgcttggtgttgaaaagatttttgatagttatttaagtggatctaaaggatcattgagatatattcatgatatttggggatatattgcaccgaatactaaaaaagagaagcagcctaaacgtggtgatgatgtccatttaacaatcgattcaaatattcaagtatttgttgaagaagctttagatggcatggttgaaagataccagccgaaagatttatttgcggttgtcatggatgccaaaactggagaaattttagcatacagtcagcgaccaacatttaatcctgaaactggtaaagactttggtaaaaagtgggcaaatgacctatatcaaaacacatacgagcctggatcaacatttaaatcatatgggttagcagctgctattcaagaaggtgcttttgatcctgataagaaatataaatctggacatagagatattatgggttcacgtatttcagactggaatagagtcggttggggtgaaatcccaatgtcactcggatttacttattcatctaatacattgatgatgcatttacaagatttagttggtgcagacaaaatgaaatcttggtatgaacgatttggatttggaaaatcaactaaaggtatgtttgatggagaagcacctggtcaaattggatggagtaatgagttgcaacaaaaaacgtcatcatttggtcaatcgacaactgtaacacctgttcaaatgttacaagcacaatcagcgttctttaatgatggtaatatgttaaaaccatggtttgtgaatagcgttgaaaatcctgttagtaaaagacaattttataaaggtcaaaaacaaattgcaggcaaaccaataacaaaagaaactgctgaaaaagttgaaaagcaattggatttagttgtgaatagtaagaagagtcacgctgcaaactatcgtattgatggttatgaggtcgaaggtaagactggtacagcacaagtcgctgcgcctaatggtggtggatacgttaaaggcccaaacccatattttgtaagttttatgggtgacgcgccgaagaaaaatcctaaagttattgtatacgctggtatgagcttggcacaaaaaaatgaccaagaagcttatgaattaggtgttagtaaagcgtttaaaccaataatggaaaatactttgaaatatttaaatgtaggtaaatcaaaagatgacacatctaatgcagagtatagtaaagtgccagatgttgaaggtcaagacaaacaaaaagctattgataatgtgagtgcaaaatcattagaaccagttactatcggttctggtacacaaataaaagcacaatctataaaagcagggaataaagtcttacctcatagtaaagtactgttattaacagatggagacttaactatgcctgacatgacaggatggacgaaagaagatgtcattgcttttgaaaacctaacaaatattaaagtgaatttaaaaggtagcggttttgtttcccaccaatcaattagtaagggacaaaaacttactgaaaaagataaaatagacgtagaattttcatcagagaatgtagacagcaattcgacgaataattctgattcaaattcagatgataagaagaaatctgacagtaaaactgacaaggataagtcggactaaaaagaatggctacattaaataaggatgtattgtcactatttgtttttactaaagtaatgctgtgatagaaaacaacatcttcatttaatctttataaataagtgttgatagagaattttaaggtagacgaggtcagattaacttgtttgttataggcaaactttttatactggcctcttatgccgtaaaaaagaaaaattataaattttgattacaactttgtttatttaattgaaaaattgataatatattagtggttaaaaaagtctggattaagaagaggagatagttatgatttttgtatatgcgttattagcgctagtgattacatttgttttggtacctgttttaatacctacgttaaaaaggatgaaatttggtcaaagtattcgagaagaaggtccacaaagccatatgaagaagactggtacaccaacgatgggtggactaacatttctattaagtattgtgataacgtctttggttgctattatatttgtagatcaatctaatccaatcatactgttattatttgtgacgattggttttgggttaattggttttatagatgattatattattgttgttaaaaagaataaccaaggtttaacaagtaaacagaagtttttggcgcaaattggtattgcgattattttctttattttaagtaatgtatttcatttggtgaatttttctacgagcatacatattccatttacgaatgtagcaattccactatcatttgcatatgttattttcattgttttttggcaagtaggtttttctaatgcagtaaatttaacagatggtttagatggattagcaactggactgtcaattataggatttacaatgtatgccatcatgagctttgtgttaggagaaacggcaattggtattttctgtatcattatgttgtttgcacttttaggatttttaccatataacattaaccccgctaaagtgtttatgggagatacaggtagcttagctttaggtggtatatttgctacgatttcaatcatgcttaaccaggaattatcattaatttttataggtttagtattcgtaattgaaacattatctgttatgttacaagtcgctagctttaaattgactggaaagcgtatatttaaaatgagtccgattcatcatcattttgaattgataggttggagcgaatggaaagtagttacagtattttgggctgttggtctgatttcaggtttaatcggtttatggattggagtgcattaagatgcttaattacacagggttagaaaataaaaatgtattagtcgtcggtttggcaaaaagtggttatgaagcagctaaattattaagtaaattaggtgcgaatgtgactgtcaatgatgggaaagacttatcacaagatgctcatgcaaaagatttagaatctatgggcatttctgttgtaagtggaagtcatccattaacattgcttgatagtaatccaataattgttaaaaatcctggaataccttacacagtatctattattgatgaagcagtgaaaagaggtttgaaaattttaacagaagttgagttaagttatctaatctctgaagcaccaatcatagctgtaacgggtacaaacggtaaaacgacagttacttctctcattggagatatgtttaaaaaaagtcgcttaactggaagattatccggcaatattggttatgttgcatctaaagtagcacaagaagtacagcctacagattatttggttacagagttgtcgtcattccagttacttggaatcgaaaagtataaaccacacattgctataattactaacatttattcagcgcatctagattaccatgaaaatttagaaaactatcaaaatgctaaaaagcaaatatataaaaatcaaacggaagaagattatttgatttgtaattatcatcaaagacaagtgatagagtcggaagaattaaaagctaagacattgtatttctcaactcaacaagaagttgatggtatttatattaaagatggttttatcgtttataaaggtgttcgtattattaacactgaagatttagtattgcctggcgaacataatttagaaaatatattagcagctgtgcttgcttgtattttagctggtgtacctattaaagcaattattgatagtttaactacattttcaggaatagagcatagattacaatatgttggtactaatagaactaataaatattataatgattccaaagcaacaaacacgctagcaacacagtttgccttaaattcatttaatcaaccaatcatttggttatgtggtggtttggatcgagggaatgaatttgacgagctcattccttatatggaaaatgttcgcgcgatggttgtattcggacaaacgaaaactaagtttgctaaactaggtaatagtcaagggaaatcggtcattgaagcgaacaatgtcgaagacgctgttgataaagtacaagatattatagaaccaaatgatgttgtattattgtcacctgcttgtgcaagttgggatcaatatagtacttttgaagagcgtggagagaaatttattgaaagattccgtgcccatttaccatcttattaaagggtgtgagtattgatggatgataaaacgaagaacgatcaacaagaatcaaatgaagataaagatgaattagaattatttacgaggaatacatctaagaaaagacggcaaagaaaaagatcaaaggctacacatttttctaatcaaaataaagatgatacatctcaacaagctgattttgatgaagaaatttacttgataaataaagacttcaaaaaagaagaaagcaatgatgaaaataatgattctgcttctagtcatgcgaatgataataatatcgatgattctacagactctaatattgaaaatgaggattatagatatactcaagaaattgacgaccaaaatgaatcgaatggaattgcagtcgacaacgaacaacatcaatcagctcctaatgaacaaaatagcgactcgaatgatgaggaaacagtaacgaaaaaagaacgaaaaagtaaagtaacacaattaaaaccattaacacttgaagaaaagcggaagttaagacgtaagcgacaaaaaagaatccaatacagtgttattacaatattagtattgttgattgctgttatactaatttacatgttttcaccacttagtaaaattgcgcatgtgaatattaatggcaataatcacgtcagtacttcaaagataaacaaagttttaggtgttaaaaatgattcgaggatgtatacgtttagtaaaaaaaatgctattaatgatctcgaagaggatccattaatcaaaagtgttgagatacacaagcaattaccgaacacattaaacgtagatatcacagaaaatgaaattattgctttagtgaaatataaaggtaaatatttacctttattagaaaatggtaaattgcttaaaggttcaaatgatgtcaaaattaatgatgcacctgtcatggatggtttcaaaggtacaaaagaagatgatatgattaaggcgttatctgaaatgacacctgaagttagacgatatattgccgaagtgacatacgccccaagtaaaaacaaacaaagcagaattgaattgtttacgacggatggacttcaagtaatcggtgatatttcgacgatatctaagaaaatgaaatattatccgcagatgtcacaatcattatcaagagatagttcgggtaaactaaaaacacgaggctatattgatttatcagtcggtgcttcatttatcccatatcgtggaaacacgtctactcaatcagaaagcgataaaaatgtgactaaatcatctcaagaggaaaatcaagcaaaagaagaattacaaagcgttttaaacaaaattaacaaacaatcaagtaagaataattaaaaaattttgatattgtctatgtttatagttcacaagccattcaacgtattgtaaactaaagatagtgtattttttaatagtaatttgtcaggaggtgcctatctatggaagaacattactacgtaagtattgatattggatcatcaagcgtaaaaacaatagtaggcgagaaatttcacaatggtataaatgtgataggtacaggacaaacctacacgagcggtataaaaaatggtttaattgatgattttgatattgcgcgtcaagcaatcaaagacacaattaaaaaggcatcaatcgcttcgggtgttgatattaaagaagttttcctgaaattacctatcattggaacggaagtttatgatgaatcaaatgaaatcgacttttatgaggatacagaaatcaacggttcacatatcgaaaaagtattagaaggtattagagaaaaaaatgatgtgcaagaaacagaagtaattaatgtgttcccgattcgttttatagtcgataaagaaaatgaggtttcagaccctaaagaattaattgccagacattcattaaaggttgaagcaggcgtaattgctattcaaaaatcgattttaattaatatgattaaatgcgttgaagcatgtggtgttgatgtattagatgtttattctgatgcatataactatggttcaatcctaacagctactgaaaaagagttaggtgcatgtgtcattgatattggtgaagacgttacgcaagttgctttttatgaacgcggtgaattagtagatgctgattctatcgaaatggcagggcgagatattacagacgatattgcacaaggattaaacacttcttatgaaactgctgaaaaagttaaacaccaatatggtcatgcattctatgattctgcttcagatcaagatatcttcactgttgaacaggttgatagtgatgaaacagtacagtatactcaaaaagatttgagtgactttattgaagcgcgtgtagaagaaatattcttcgaagtatttgatgttttacaagatttaggattaacaaaagtaaatggtgggtttattgtaactggtggatctgcaaacttacttggcgtaaaagaattattatcagatatggtaagtgaaaaagttagaattcacacgccatcacaaatgggaattagaaaacctgaattttcttcagcaatttctacaatttctagtagtatcgcttttgatgagttattagattatgttacaattaattatcatgataatgaagaaactgaagaagatgttattgatgtgaaagacaaagataacgaatctaaattaggcggatttgattggtttaaacgtaaaacaaacaaaaaagatactcatgaaaatgaagtagagtcaacagatgaagaaatttatcaatcagaagataatcatcaggaacataaacagaatcatgaacatgttcaagacaaagataaagaagaaagtaaattcaaaaaactaatgaaatctctatttgaatgattattggccaataaaactaggaggaaatttaaatgttagaatttgaacaaggatttaatcatttagcgactttaaaggtcattggtgtaggtggtggcggtaacaacgccgtaaaccgaatgattgaccacggaatgaataatgttgaatttatcgctatcaacacagacggtcaagctttaaacttatctaaagctgaatctaaaatccaaatcggtgaaaaattaacacgtggtttaggagcaggagctaatcctgaaatcggtaaaaaagctgcagaggaatctcgtgaacaaattgaagatgcaatccaaggtgcagatatggtatttgttacttctggtatgggtggcggaactggtactggtgcagcaccagtcgttgctaaaattgcaaaagaaatgggcgcattaactgttggtgttgtaactcgtccatttagttttgaaggacgtaaacgtcaaactcaagctgctgctggagtagaagctatgaaagctgcagtagatacattaatcgttataccaaatgaccgtttattagatatcgttgacaaatctacgccaatgatggaagcatttaaagaagctgacaacgtgttacgccaaggtgtacaaggtatctcagacttaatcgctgtttctggtgaagtaaacttagactttgcagacgttaagacaattatgtctaaccaaggttctgcattaatgggtattggtgtttcttctggtgaaaatagagcggtagaagctgctaaaaaagcaatctcttctccattacttgaaacatctatcgttggtgcacaaggtgtgcttatgaatattactggtggcgagtcattgtcattatttgaagcacaagaggctgctgatattgtccaagatgctgcagatgaagacgttaatatgattttcggtacagttattaatcctgaattacaagatgagattgttgtaacagttattgcaactggttttgatgacaaaccaacatcacatggtcgtaaatctggtagcactggattcggaacaagcgtaaatacttctagcaatgcaacttctaaagatgaatcattcacttcaaattcatcaaatgcacaagcaactgatagtgtaagtgaaagaacacatacaactaaagaagatgatattcctagcttcattagaaatagagaagaaagacgttcaagaagaacaagacgttaatcggttaatatatacacacaaataattcaacacaaatcatcagataacatatctgatgatttttttactaatttttagaacatgtagaaggacatttaagtttttccaagtcattaaaagtgtttaactatcgtgtcaaaattaagtcgaaaattatttgcgcaacattttaactttaaacataaatgttatattatataattattaactttatacagttagacgaagataatttaaatgaaatgatggtgacgatcgagtgaatgataattttaaaaagcaaccgcatcatttaatatatgaagaattattacaacaaggtattactctaggtattacaactagaggcgatggtttaagtgactatcctaaaaatgcttttaatatggcgagatatattgatgatcgcccatataatattactcaacatcaattgcaattagctgaagaaattgcgtttaatagaaaaaattgggtatttcccattcaaacacatgaaaataaagtcgcttgtattacaaaggatgatataggcacaaatatagacactttaactgatgcgcttcatggtattgatgcgatgtacacatttgatagtaatgtcttattaacgatgtgttatgcagactgtgtaccagtatatttttatagtacaaaacatcattttattgcattggcgcatgcagggtggcgaggtacctacactgaaattgtaaaagaagtgctaaaacatgtgaactttgatttgaaagacttacatgtcgttattggaccatctacatcatcaagttatgaaattaacgatgatattaaaaataaatttgaaacattgccaattgatagtggaaactatattgaaactaggggacgagatcgtcatggtattgatttgaaaaaagccaatgctgcattattaaattattatggtgttcctaaagaaaatatttatacgacagcgtatgctacatctgaacatttagaattatttttctcttatcgattagaaaaaggtcaaacaggacgcatgttagcattcattggtcaacagtaaataaggaggggatatgcttgcgtgtgaaagataatttacaacaaatctcaacacaaattaatgacaaaagtaaaaaaaataatttttcaacaaaaccaaacgtgattgcagttacaaaatatgttacaatagagcgagctaaagaagcgtatgaggctggaataagacattttggtgagaatagattggaaggcttttttcaaaagaaagaagcattaccatcagatgcggtgatccattttataggatcattacaatctcgaaaagttaaggacgttataaacgacgtagattatttccatgctttagatcgattgagcttagccaaagaaattaacaaacgtgcagaacataaaattaaatgtttcttgcaagtgaacgtttcgggagaagcttctaaacatggtattgctttagaagatgttgatcagtttatagatgatcttaaaaaatatgacaaaatcgaaattgtaggtttaatgacgatggcaccattgacagatgatgaagcatatattagatcgttatttaaacagttacgtttgaaaaaagaagaaatacaacgactcaatttagaatatgcgccttgtgatgaattatcaatgggaatgagtaatgactatcttattgcagttgaagaaggtgcaacgtttgttagaattgggactaaacttgtaggagaagaggagtgagccacttggctttaaaagatttatttagtggattttttgtaatagatgatgaagaggaagtagaagtacctgacaaacaacaacaggtaaatgaagcgccagcaaaagagcagtcacaacaaacaacaaaacaaaacgcaatcaaatcagtccctcaaaaatctgcatcaagatatacaacaacgtcagaagaaaggaataaccgtatgtctaattattcaaaaaataattcacgtaatgttgtaactatgaacaatgctacaccaaacaatgcatcacaagaaagttcgaaaatgtgtttattcgaaccacgtgttttttcagatacacaagatattgctgatgagcttaaaaaccgccgtgcgacacttgtcaatttacaacgtattgataaagtatcagcgaaaagaattattgattttttaagcggtactgtttatgcaatcggtggagatatccaacgtgtaggtactgatattttcttatgtacgcctgataatgtggaagtagctggaagcattacagaccatattgaaaatatggaacattcattcgactaaggagttaacatatggatataaatgtgctagctacaatatttaaatttatcctttttgttgttgaaatttattatttcggcatgattatatatttctttacatcttgggtaccaagtattagagaaactaaggtaggttattttttagcgaaaatatatgaacctttcttacaaccatttagaaaagtaattccacctattggaattatcgacatatcatcaatcgctgcaattttcgttttagtattattccaaagagggttactccaaatctttaattggattttaattcaattacaataaattaagcgacataacgaggcaagggtatatgatactttagcctcgtttttgatatctatttttctgaatataagggcaatagatggtattttataatttttttaaggtagtgattaacatagatatttatcaacactttagacaggaagaatatgaattaattgatcagctatcggataaatgtgatcaagcggaacagcattatgcaccagtattaacgcattttttagatccaagagggcaatatatattggaagtgatttgtggcagttatgaagatttaaacgtatctttttatggcggacctaatgttgaaaaaaaaaagagcaatcatttcgccaaactattatgaacctaaagaaagtgactttgatttaacattaatggaaatagattatcctgaaaaattcgtcactttaaaacatcaacatattttagggacattaatgtctttaggtatcgaacgcgaacaagttggagatataattgtgaatgaacgaattcaatttgttttgacaagtagattggaatcatttattatgttagaattacaacgtattaaaggcgcatcagttaaactttatactattccagtaacagatatgatacaatctaatgagaattggaaaattgaaagtgcaacagttagttctttaaggttagatgttgttattaaagaaatgatacgtaaatcacgtacgattgcgaaacaactaatcgaaaaaaaacgtgttaaagtgaatcacactattgttgattcagcagattttcaattacaagcaaatgatttaatatccatccaaggttttggtagagcacacattactgacttaggtggtaaaactaaaaaagataaaacgcgcattacctatagaacattattcaaatagtaatgatttaaggaggataacaaatgccttttacaccaaatgaaattaagaataaagagttttcacgtgtaaagaatggtttagaacctactgaagttgctaattttttggagcaactaagcactgaaattgaacgtcttaaagaagataaaaaacaacttgaaaaagtaatcgaagagagagatactaatattaagtcttatcaagacgtgcatcaatctgtaagtgatgctttgatacaagctcaaaaagctggtgaagaaactaagcaagctgcagagaaacaagctgaagcgattatagctaaggcagaagcgcaagctaatcaaatggttggtgacgcggtagaaaaagcacgccgtttagcattccagactgaagatatgaaacgtcaatcaaaagtatttagatcgcgtttccgtatgttagttgaagcgcaattagacttattaaaaaacgaagattgggattacttgttgaattatgatttagacgctgaacaagtgacgcttgaaaatattcatcatttacatgaaaatgatttaaagccagatgaagttgcagcaaatgcacaaaataatgcatcaaatacatcagacaataatcaacaatccaatgattcagaaacaactaagaagtaagaattaaataaagacagacgcgtaatatacatttaacttttcacagcgaattaggtaatggtgagagcctagtaaaagcatgtatgttatatcactggctttttaatatttaaataatgtaatgagagaactctaagttgagttaataagggtggtaccgcgagcaatcgtcccttttaatttaacttagagttttttaaatttttaaggagtgaaaaaatggattacaaagaaacgttattaatgcctaaaacagatttcccaatgcgaggtggtttaccaaacaaggaaccgcaaattcaagaaaaatgggatgcagaagatcaataccataaagcgttagaaaaaaataaaggtaacgaaacattcattttacatgatggcccaccatacgcgaatggtaacttacatatgggacatgccttgaacaaaattttaaaagactttattgtacgttataaaactatgcaagggttctatgcaccatacgtaccaggttgggatacacatggtttaccaattgaacaagcattaacgaaaaaaggtgttgaccgtaagaaaatgtcaacagctgaattccgtgagaaatgtaaagaatttgctttagaacaaattgaattacagaaaaaagattttagacgtttaggtgttcgtggtgactttaatgatccatatattacattaaaacctgaatacgaagctgcacaaattcgtatttttggagaaatggcagataaaggtttaatttacaaaggtaaaaagccagtttactggtctccttcaagtgagtcttcattagcagaagctgaaattgaatatcatgataaacgttctgcatcaatctatgttgcatttgatgtgaaagatgacaaaggtgtagtagattcagatgctaaatttattatttggacaacaacaccttggactattccatctaatgttgcaattactgtacatccggaattaaaatacggtcaatataatgttgatggtcaaaaatacatcgttgcagaagcgttatctgatgccgtagcagaagcattaggctgggataaagattcaatcaaattagaaaaagaattttcaggaaaagaattagagtatgttgtagcacaacatccattcttagatagaaaatcattagtaattaatggtgaacatgttactacagatgctggtacaggttgtgtacatacagcaccaggtcacggggaagatgactatattgtaggtcaaaaatatgaattgcctgttattagtccaattgatgataaaggtgtcttcactgaagaaggtggacaatttgaaggtatgttttatgataaagcaaataaagccgttacggatttattaactgaaaaaggtgctttattaaaattagactttattacacatagttatccacatgactggagaacgaaaaagccggttattttccgtgcaacacctcaatggtttgcatcaattagtaaagttagaaaagatattttagatgcaatcgaaaacacaaacttcaaagtaaattggggtaaaacacgtatttataatatggtacgtgaccgtggcgaatgggttatttcacgtcaacgtgtttggggagtaccgttaccagtattctatgctgaaaacggcgatattatcatgactaaagaaacagtgaatcatgttgctgatttatttgctgaacacggttcaaatatttggtttgaaagagaagctaaagatttgttacctgaaggatttacacatcctggtagccctaacggcacatttactaaagaaacagacatcatggatgtttggttcgattcaggttcatcacatcgcggtgtattagaaacaagacctgaattaagcttcccggcagatatgtacttagaaggtagtgaccaatatcgtggttggtttaactcatcaatcacaactgctgttgctacgagaggtgtttctccttataaattcttactttcacatggatttgtaatggatggagaaggtaagaaaatgagtaaatctttaggtaatgtgattgtacctgaccaagtggttaaacaaaaaggtgctgatattgcgagactttgggtaagtagtacggactatttagctgatgttagaatttctgatgaaattttaaaacaaacatctgatgtttatcgtaaaatcagaaatacattaagatttatgttaggtaatattaatgatttcaatcctgatacagatagcattcctgaatcagagttattagaagtggatcgttacttgctaaatcgtttacgtgaatttactaaaagtacgattaacaactatgaaaactttgactacttaaatatttatcaagaagttcaaaactttatcaatgttgagttaagtaatttctatttggattacggtaaagatattttatatattgaacaacgtgattctcatatccgtcgtagtatgcaaacagtgttatatcaaattttagttgatatgacgaagttgttagcaccaatcttagtgcatacagctgaagaagtttggtctcatacgccacatgttaaagaagaaagtgttcacttagcagacatgcctaaagttgtagaagtagatcaagctttattggataaatggcgtacatttatgaatttacgtgatgatgtgaaccgtgcattagaaagtgctcgtaatgaaaaagttattggtaaatcattagaagctaaagttacgattgctagtaacgataaatttaatgcatctgaattcttaacttcatttgatgcattacatcaattatttatcgtgtcacaagttaaagttgtagataagttagatgaacaggcaacagcttatgaacatggtgatattgccatcgaacatgcagatggtgaaaaatgtgaaagatgttggaactattcagaggatcttggtgctgttgatgaattgacgcatctatgtccacgttgccaacaagttataaaatcacttgtataattgaaattgtataaagtactcatacagatgatataaattaaagctctcttcataatcatgttgtagtttttgttgacatgatgaggagagtttttttgcgaataaaaaatgaccaagttactggttatatgtgttaaaaaatgtgtgattcactaaaataaaaattattcaggaatggtacaaattctctgaagcttataaatgcgttatagttgctattctcaattatgttcgcgataattttaagtaaaagtaagcacagatattgaatttgataggagttaattgaatgtatcataacagtaacgcaaactttgtaaatggtatcactttaaatgtgagagataagaatgaattaaagccattttatgaggacgtattaggattaaatattataaatgagacattaacatcgatacaatatgaagtaggtcaaaataatcatgtcattacacttgttgaattacaaaatggacgtgaacctttaatgtcagaagcgggactgtttcatatcgcaattaaactacctcaaattagtgatttagctaatttgctaattcatttaagcgaatatgatattccagttaacggaggtatacagcctgcttcgttatcattattttttgaagacccggaaggaaacggttttaaattttatgttgataaagacgaagcgcaatggacgaggcaaaatgatttagtaaaaattgatattagaccattaaatgtaccgagattagtgagtcatgcaacaaaattgttatggttaggtattccagatgacgctattataggtgcattgcatattaagacaattcatttatcagaggtaaaagactactacctcgattattttggattagagcaatcggcatatatggatgattattcaatatttttagcatcgaatggctattatcaacatttggccatgaatgattgggtatcagcaacgaaacgtgtagaaaattttgatacgtatggattagcaattgttgactttcattatcctgaaacaacacatttaaatttacaaggtccggatggtatctattatcgatttaatcatatcgaagttgaagattagtatatactttgaatggacgaaccatataatgaatcgtttttaatgatctttttatacaagttatgaaggcagtcttatgaggtttctcatgaggctgctttcataatttttaatgtcatcttaaatatgataaatgaataattaagttcatatttaatgtcaaaacatagtagtttatcaagtgttgagtcagtaacattagatttaatgtaatatgcttactttttttattagcaggtgtaagctataatataaagagttgtcttatggacgattgattggaggaacgaaaatgcacaaaaaatattttattggcacttccattttaatagcagtatttgtcgttatatttgaccaggttactaaatatattatagctactacaatgaaaattggagattcatttgaagtgataccgcactttttaaacataacgtcacatcgaaataatggtgctgcatggggaatattgagtggaaaaatgacatttttctttattattaccattattatattaatagccttagtatatttctttattaaagatgctcaatataatttatttatgcaagttgctattagtttactttttgcaggtgcacttggaaactttattgatagagttttaacaggagaagttgttgactttattgatacaaatatttttggttatgattttccaatatttaatatcgcagattcaagtttaacaattggtgtaatattaattattattgccttattaaaggatacttccaataaaaaggagaaggaggttaagtaatggagacttatgaatttaacattacagataaagaacaaacaggtatgcgtgtagataagttgctgcctgaattaaatagtgattggtctcgtaaccagatacaagattggattaaagcaggtttagtcgttgcaaacgataaagttgttaaatctaattataaagtgaaacttaatgatcatatagttgtcactgaaaaagaagtggttgaagctgatattctacctgaaaatttaaatttagatatttattatgaagatgatgacgttgcagttgtttataaaccgaaaggcatggtagttcatccatcaccaggtcattataccaatacattagttaatggtttaatgtatcaaattaaagatttatcgggtattaatggagaaattcgtccaggtattgttcaccgtatagatatggatacttctggtttattaatggttgctaaaaatgatattgctcatcgtgggcttgtagaacaattaatggataaatctgttaaaagaaaatatatcgctttagttcacgggaatattcctcatgattacggtacaatcgatgcgccaattggtagaaacaaaaatgatcgtcaatctatggctgttgttgatgatggtaaggaagcagtgacacattttaacgtactagaacattttaaagattatacgcttgttgaatgtcaacttgaaacaggacgtacgcatcaaatccgtgtgcacatgaaatatattggcttcccattagttggtgatccaaagtatggaccgaaaaagacattggatattggtggtcaagctctacatgctggacttattggattcgaacatccagtaacaggtgaatatattgaaagacatgctgaattaccacaagactttgaagatttattagatacaattcgaaaaatagatacataattgtgtcgtgctataattacgataacattattatgtaaactataagtatttatcgttttcgtttttttaaaatgaaaacacattataaaatagattaaggttaacatttttactgagatcggttaatttttcaatatagattgacaaagcgcctgattagtattatccttataacagtttaagtacaacataaagagtctttaattgagcgtccagagagacgtcaaagacatgaaaatatagatatatactaaaatgaatcataacactttcacatatgcaagaataagtagtaatactacgattcttctatgtaaataggctgattgtatatactaaacctcatgtcgatattaaagacatgaggttttttgtttctaaattttgaaagggtgagaatatgtctgaacgtatcataatggatgatgccgcaatacaacgtacagtgacgagaatcgctcatgaaattttggagtataacaaaggtactgataatttaattcttttaggtatcaaaacaagaggtgaatatttagcgaatcgtatacaagataaaattcatcaaattgagcaacaacgtatacctactggaacaattgatattacatactttagagatgatatagagcacatgtcatcgcttacgacaaaagacgcaatagacatcgacacagatattacagataaagtagtcatcattattgatgatgtgctgtatactggtcgaacggttcgtgcttcacttgatgctattttgctaaatgctagacctattaaaattggtttagctgctttggttgatcgaggacatcgtgagttaccaattcgagcagattttgttggaaaaaatatacctacttctaaagaggaaacggtaagtgtctatttagaagaaatggatcaaagaaatgcagttataattaaataataccccttttaattcagtacgagagactgaaaaaggtgggggagttgaatgataaataagatttcatatgcttgtttatctaataataccctcatgttcgacaactataagtcaatttctatggacgaaaatgacttgtagcaacttgtcacactttttgtctctttacatatactgatgtaaagagatttttttattatcggaggaaatgaatattatgcaaaatgatgaaatgtttgaacgaacagtaaaacctgtactagatgtaaatgaaaaaccacaaccagcgcaatgggcatttttaagcttacaacatttatttgcgatgtttggcgcaacagtactagtaccattcttaacaggattaccaatatccgcagcgttactagcttcgggaatcggtacattactttatatcttaataacgaaggcgcaaataccagcttacttgggatctagctttgcatttatcacaccaattatcacgggattaagtacgcatagcttaggagacatgcttgtagcattattcatgagtggtgttatgtacgtcatcattgggattctaatcaaattaagtggaacagcatggttaatgaaattattaccaccagttgttgtaggaccagtcatcatggtaattggtttaagcttagcgcctactgcagtcaatatggcaatgtatgaaaatcctggagatatgaaaggttacaatatcagtttcttaattgttgcaatgataaccttgcttgtaacaatagccgttcaaggattttttaaaggattcctatctttaattccagtacttgtaggtattatcgtaggttatgtggtagcgatttttatggggattgtgaaatttgatgcaattatgtcagcaaaatggatagatttccctcatatttatctgccatttaaagattatgtaccttcatttcacttaggacttgtacttgtaatgattccgattgtgttcgtaacagtaagtgaacatattgggcaccaaatggtattgaataaaatcgtaggtagaaacttctttgaaaagccaggacttgataaatcaatcattggtgatggtgtttctacaatgtttgccagtattattggtggaccaccaagtacaacatacggtgaaaatatcggtgtattagcgattaccagaatatacagtatttacgtcattggtggtgcagcagttatagcaattgttttagcattcattggtaagttcactgcattaatttcttctatacctacaccagttatgggaggagtatctatattacttttcggtattattgcagcaagtggcttaagaatgttagttgaaagcaaagtagattttgcgaacaatcgaaatttagttatagcttcagtaattttagttgtaggtatcggtaatttagtatttaacttaaaagaaattggtatcaaccttcaaattgaggggatagcattagctgcactttcaggaattattttgaacttaatcttacctaaagagaaaaaacaaaacaattaagatttacaaattaaggagggcgcttttatgaatcatttattatcaatggaacatttatctacagatcaaatatacaaacttatccaaaaagcaagtcaatttaaatctggtgaacgtcaactaccaaactttgaagggaaatatgtcgcaaatttattctttgaaaattctactcgaacaaaatgtagttttgaaatggcagaacttaagctagggttaaaaacgattagctttgaaacatcaacatcatctgtttcaaaaggtgaatctttatatgacacatgtaaaactttagaaagtattggctgtgatttattagtcattagacatccgtataataactactatgaaaaattagcgaatattaacatcccaattgcgaatgctggtgatggtagtggacaacatccaacacaaagtttgcttgatttaatgacgatatatgaagaatatggatattttgaaggcttgaatgtattgatttgtggagacattaaaaattcacgtgtcgcacgtagtaattaccatagtttaaaagcattaggtgcaaacgtaatgtttaatagcccaaatgcttggattgatgattctttagaagcaccttatgtaaatatagatgatgttattgaaacagtagatatagttatgttattaagaattcaacatgaaagacatgggcttgcagaagaaactagatttgcagcagatgattatcatcaaaagcatggcttaaatgaagtacgctataacaaattacaagaacatgcaattgttatgcatccggcacctgtgaatagaggagtagaaatacaaagcgatttagtagaagcttcaaaatcaagaatttttaagcaaatggaaaatggcgtttacttaagaatggcagtcattgatgaattattaaaataggtaaggggacgaaaatgatgaaattaattaaaaacggtaaagtattacaaaatggcgaattacaacaagcagatattttaattgatggtaaggtaattaaacaaattgcacctacaattgaaccaagcaatggtgttgacatcatagatgcgaaaggtcactttgtgtcacctggatttgtcgatgttcatgttcatttacgcgaacctggtggtgaatataaagagacaattgaaactggtactaaagctgctgctagaggcggatttacaactgtatgtccaatgcctaacacaagaccggtaccagattctgtagaacattttgaagctttacaaaaattaatcgatgacaatgctcaagtacgtgtattaccttatgcttcaattacaacacgtcaattaggtaaagaattggttgatttcccagcactagtaaaagaaggtgcttttgcgtttacagatgacggtgtaggagtacaaactgcaagcatgatgtatgaaggcatgattgaagctgcaaaagtaaacaaagccatcgtagcacactgtgaagataattcattaatctatggtggtgcaatgcatgaagggaaacgcagtaaagaattaggtataccaggtattccaaacatttgtgaatctgttcaaatcgcaagagatgtactattagctgaagcagcaggttgtcattatcatgtatgtcatgtttctactaaagaaagtgttagagtcattcgtgatgctaaacgcgcaggcattcatgttacagctgaagttacaccacaccatttattgttaacagaagatgatattcctggtaacaatgccatttataaaatgaatccaccattgagaagtactgaagatagagaggctttgttagaagggttactagacggtacaattgactgtatcgcaacagatcatgcaccacatgcacgtgatgaaaaagcacaaccaatggaaaaagcaccattcggaattgttggtagtgaaacagcattcccattattatatacacattttgtaaaaaatggtgattggacattacaacaattagtagattacttaacaattaaaccatgtgagacatttaatttagaatacggcacattaaaagaaaatggttatgcagatttaacaatcattgatttagatagtgaacaagaaattaaaggtgaagattttttatcaaaagcagataatacaccatttatcggctataaagtttatggaaatccgatcttaactatggttgaaggcgaagttaaatttgagggggataaataatatgcaaagcaaacgttatctagtgttagaagacggttctttttacgaaggctaccgtttaggatctgataacttaactgtaggagaaattgtatttaatacagcgatgacaggttatcaagaaactatttcagatccatcatatacaggtcagatcattacttttacgtatccattaatcggtaattatggtatcaatagagacgattttgaatcattagtacctacattaaacggtattgtagtgaaagaagcgagtgcgcatccaagtaattttagacaacaaaagacacttcatgacgttttagaattgcatcaaattccagggattgcaggtgtagatacaagaagtattacgcgtaaaattcgacaacacggtgtgttaaaagctggttttactgatcgaaaagaagatattgatcaacttgtcaaacatttacaacaagtagaattacctaaaaacgaagtagaaatcgtttcgactaaaacaccgtatgtttcgacaggtaaggatctaagtgtcgtacttgtagactttggtaagaagcaaaatattgttcgagaattaaacgtcagaggttgtaacgtcacggttgtaccatatacaactactgccgaagaaattttagcaatggctccagatggtgttatgctatcaaatggaccaggtaatcctgaagttgtagaatgtgcgattccaatgattcaaggaattttagggaaaattccgttctttggtatctgtctaggacatcaactttttgcattatctcaaggagcaagctcatttaaaatgaagtttggtcatcgtggtgcgaaccatccagttaaaaatttagagactggaaaagttgatattacgagtcaaaaccatggatatgcaatagatatagattcgttaaaaagtactgatttagaagttactcatcttgcattaaatgatggtactgtagaaggtttaaaacataaaacattaccagcattttctgttcaataccatcctgaagcaaatccaggaccgtcagattcaaactatctatttgatgattttgtagcaatgatgactaattttaaggaaaaggagcgtcatatcaatgcctaaacgtaatgatatcaaaacaattttagtaatagggtctgggccaattatcataggtcaagcagctgaatttgattatgctggaacacaagcatgtctagctttaaaagaagagggataccgagttattcttgtaaattcaaatccagcgacaatcatgactgataaggaaattgcggataaagtatatatcgaaccgttaactcatgattttatagcgcgaattatacgtaaagagcaacctgacgctttacttccaactttaggtggtcaaacaggtttaaacatggcgattcaactacacgaaagtggtgtgcttcaagataataacgtccaattattaggaactgagctaacatcaattcaacaagcagaagaccgtgaaatgtttagaacattaatgaatgatttaaacgttcctgtaccagagagtgacattgtaaatacagtagagcaagcctttaaattcaaagagcaagtgggatacccgctaattgttagaccagcatttacgatgggtggtaccggaggcggtatttgtcataatgatgaagaattacatgaaatcgtctcaaatggtcttcattatagtccagcaacgcaatgtttattagaaaaatctatcgcaggttttaaagaaatcgaatacgaagtaatgcgtgataaaaacgataatgccatcgttgtatgtaacatggaaaatattgatccagttggtattcatacaggtgattcaattgttgtggctcctagccaaacattatcagatgttgagtatcaaatgttacgtgatgtttcattaaaagttattcgagctttaggtatcgaaggtggttgtaatgttcaattagcattagatccgcattcattcgattattatattatagaagtaaatccgcgtgtatcacgttcatcagcgttagcttcaaaagcaacaggatatcctattgcaaaattagctgctaaaatcgcggttggtctaacattagatgaaatgttaaatccaattacaggaacatcttatgcagcgttcgaaccaactttagactatgtgatttcaaaaataccaagatttccttttgataaatttgaaaaaggagaacgagagcttggcacacaaatgaaagcaacaggtgaagttatggccattggtcgaacttacgaagaatcattgttaaaagcaattcgatcacttgagtatggtgtgcatcacttaggattaccaaatggtgaaagcttcgatctggattatattaaagaacgtatttcacaccaagatgatgaacgattatttttcatcggcgaagcaattagaagaggcacaacattagaagaaattcataatatgactcagatagattacttcttcttacacaagttccaaaacattattgatattgagcatcaattaaaagagcatcaaggtgatttagaatatcttaaatatgcaaaagattatggatttagtgataaaacaatagcgcatcgctttaatatgacggaagaagaagtatatcaattgcgtatggaaaatgatattaaacctgtttacaagatggttgatacttgcgcagctgaatttgaatcttcaacaccatattattatggtacatacgaaactgaaaatgaatccataattactgacaaagaaaaaatcttagtattaggctctggaccgattcgaatcggccaaggtgtagaatttgactatgcgacagttcacgccgtttgggcaattcaaaaagcagggtacgaagcgataattgtgaataacaatccagaaacagtatcaacagacttctcaatttctgacaaattatactttgaacctttaactgaagaagatgtgatgaatatcattaatttagaaaaacctaaaggtgtcgttgtacaatttggaggacaaacagcgattaatttagcagacaaattggctaaacatggagttaaaatacttggtacttcactagaaaatctaaatcgtgctgaagatagaaaagaatttgaagcactattaagaaaaattaacgtgccacagccacaagggaaaacagctacatcacctgaggaagcattagcaaatgctgcagaaatcggatatccggttgtagtcagaccttcttatgtattaggtggtcgcgcaatggaaattgtagacaatgacaaagagttagaaaactatatgacccaggctgtaaaagcgagtccggaacatccggtactagtcgatagatatttaactggtaaagaaattgaagttgatgcgatttgtgatggagaaacggtcattattccaggaatcatggaacatattgaacgtgctggtgttcatagtggtgactcaatcgctgtatatccgccacaaactttgacagaagacgagttagcaacacttgaggactatactataaaattagctaaaggtttaaacatcattggattaatcaacattcaattcgttatagctcacgatggtgtgtatgttttagaagtaaatccacgttctagtagaacggtaccattcttaagtaaaattactgatattccaatggcacaattggcaatgcgagcaattattggtgaaaaactgacagatatgggttatcaagaaggggttcaaccatatgctgagggtgtatttgtgaaagcaccggtatttagttttaataaattgaaaaatgttgatattactttaggacctgaaatgaagtctacaggtgaagtaatggggaaagatactacattagaaaaggcgttattcaaagggttaacaggtagtggtgttgaagttaaagatcacggtacagtattaatgaccgtcagtgacaaagataaagaggaagttgttaaattggcccaacgcttaaatgaagttggctataaaattttagcaacgtctggaacagctaataaattagctgagtatgacatacctgcagaagtagtaggcaaaattggtggcgaaaatgatttattaacacgtattcaaaatggtgatgttcaaatcgttataaatacaatgactaaaggtaaagaagtagaaagagatggcttccaaattagacgtactacagttgaaaatggtattccatgtttgacatctttagatacagctaatgccttaacgaatgtaattgaaagtatgacatttacaatgcgtcaaatgtaaatcaatcaaactgtatcggtgaggctgtaattaaccatttacttaaagaagtttatattacagcctcattattttaatgaatttcttaacgtaaagggagacatatatgatgaaagatttaccaattattgcattagattttgaatcaaaagaaaaagtaaatcaatttttagatttatttgatgaatcattattcgtaaaagtaggtatggaactattttaccaagaaggtcctcaattaattaatgagataaaagaaagaggccatgatgtatttttagatttaaaactgcatgatattcctaatacagttggtaaggcgatggaaggactagctaaattgaatgttgatctggtaaatgttcatgctgctggtggcgtaaaaatgatgtctgaggccattaaaggattaagaaaacataatcaacatacaaaaattattgcagtaacacagcttacgtcaacaacagaagacatgttacgacacgaacaaaatatacaaacatcgattgaagaggccgttttaaattatgccaagttagcaaatgcagctggtttagatggcgtagtttgttcacctcttgaaagtcgtatgttgactgaaaagttaggtacatcatttttaaaagtaactccaggcattagacctaaaggtgcatctcaagatgaccaacaccgtattacgacaccggaagaagcaagacagcttggttcgacgcatattgtagttggtagaccgattacacaaagtgccaatccagtcgaaagttatcataaaattaaagaaagttggttagtataatggctaaagaaattgcaaaatcattattagatattgaagctgtaacattatcaccaaatgatttatatacatggagttcaggtattaaatcaccgatttactgtgataaccgtgttacgttaggttatcctttagttcgaggcgcaatccgtgatggtttaattaacttaattaaagaacactttcctgaagtagaagttatttctggtactgcaacagctggtattccacatgcagcttttattgctgaaaaattaaaattaccaatgaattatgttcgttcatcaaataagagtcatggtaagcaaaatcaaattgaaggtgctaaaagcgaaggtaaaaaagtagttgtgatagaagatttaatttcgacagggggatcttcagtcacagcagttgaagctttaaaacaagcaggtgcagaagtattaggtgttgtagctatctttacttacggtttgaaaaaagcagatgatacatttagcaatattcaactacctttttacactttaagtgattacaatgaattaattgaagtagctgaaaatgaaggtgaaatttctagtgaagatatccaaacattagttgaatggagagacaacttagcataatatagacactagaaggaggaattcaacaaatgaatgacaaaacatctaatgatttatatgggaagataaaacattgtaacgaatttatcaatcattcaaatgattccaatctatctagtagtcacgatgtcgacgaaaattcaacgaagcaaaaacatataaaaaataaaacaactatagatcataatgatgatttatttaaacatgtaaaggatatattacgtaagcaaggacaaatttaaaaacaaaaaagctatagtgtttaatatcaggggctgcttaaccgcatccgaatattacaaacactatagcttttattatataaaaaatttattagcggataattaactttattaaaatccaaccaattaagaatacgagtaataggactaatactggaatcacataatgtaacataacgtccctcctttaacttaattttaattgtaatcaaatttgacaataagtcaaaacattaataccaatgataagtatcatttattaacatatgtatcatatttttaatcttgcgtaatttttatcgttaactatgtgatttaatcaatagccaataagacgtttgtcattcgcgcacataacggtacgacgcgcttttgtcattttaattatgttaagataatagtagttatagaagttcaatctataggaggcgtagcatggatattccaaaaattacgacatttttaatgtttaataaccaagctgaagaagctgttaaactatacacaagcttatttgaagatagtgagattataacaatggctaagtatggtgaaaatggacctggtgatcctgggactgtacaacactcaatatttacattaaatggacaagtattcatggcgattgatgctaatagtggtacagaattaccaatgaatcctgcgatttcattatttgttacagtaaaagatactattgaaatggaacgactatttaatggattaaaagatgaaggtgccattttaatgccaaaaacgaatatgccaccatacagagagtttgcttgggttcaagataagtttggagtaagttttcaattagcattacctgagtaataggattcgcacagcgttgaatgataaagaaacacttcttcttatgcatgcgttttacctatgtattcctatttaaagtacacattatctgtggttgatgataaagaaccactacataataaatgattagtagttctttatcattttagtttcactcatttttaaaatcacaaagataatttgtaacttaaatgatgatacgttattaaaaaacacgatacttcgtttcaatgaacgcattaaattaaaaataaacacctcgcaaaagaaagtagtcctttcttatggtgaggtgtttatttgtcgacaacttgattatgattgtttcattttttgaatatgttcataatcaggtgtagcatacaaagttttttgattgtcatatgttacaaacccaggctttgcacctgatggtttatgcacatttttaattaacgtgtaatcaacaggtatttgtccagaattaccagcttttgaaaaatatcctgctaacatagccgcttccttgattgtcgtatcacttggtgcatcattaaatataacgacatgtgaaccaggaatatcttttgtgtgtaaccatgtgtgcgtttttttagcttttttatttgttaaataatcattttgcttgttattcttgccaacatatatatcgtcgccatcagttgatacataatgttgtaattgaatctgctctttctttttcttagtttgatttttacgctgtttcataaagccttgttctgctaattcatctctaatttcatcaatgtcatggacagaaatatgatgtaattgttgttcgattgttgaaaaataatctatattgtctttcgtcaattgaatttgatgttgtaattcacgttctctcgttttcatacgattatattgtttataataatattgagcatttgctgatggggattttgtaggatttaaaggaatgacaacttcttcattcgtataataattcaatgctgtcacttctttatcaccttgcttaattcgatatatattagcagtgatcaattcaccatataactgttcagtatctttatttttagactgctcatattcttcaatcaacttcgctaatttattttgatatttgtgcaactgctgttgaacaaatcgaactaaatcattcgcacgttgtttaacgcgttcacgttcgccacgcgcatcataaaaacgatcaagtaaatcatttaatgaatcgtacgtaactgtatcatcattaaattgatttaactttataaaatagaaatcctctttacctgtttcatgatttttatgaaaaataggagtaggtggtaacttggtttctgccattacttcatcgaatgcttctggtaatgttgatgaagtcataaattgacgacgattaacgatttcattcgtaattaaagggctaaatccttcaaactgattcaataattgtttagcaatattacctgcgttaaaatcgatatatttcaacacctctgcacctgtaatatcatacggattcattttgtgctgagtaggtggtgcttcataattaaaacctggcattactgtacgatagtgattcgtatttggtgttaagtgtttaaatccttcaattattttgcgattttcatctactaaaattaagttactatgtttacccataatctcaaggatgacagtgcggtaaatagtatcgccaatttcatctttactctttatatcgatttcaatgcgacgatcattaccaatttgcttaatcgattcgataataccaccttctaagtgttttctaaaaacacgcgcaaacatgggtggattaaatggattatcatattttttagtagtcaattgtaatcttgaaaagtttggatggattgacaataacaactgatggttttgtctattttgacgtacaaccattagtatcgtgtcattatcaggttgattgattttgtgaacgcgtcctgttgttaaaaattgtagagactcaaccattttctttgtaaataagccatcataagccataatttatcttccaccttcttcatatcattcgtttcattttaacatgattgtaacttttcggtatagttattgaatcatacattatgccacgcattttacattatctaaaagttcgcaattcaatttatttaattaaaattaatcgtgcaatataacgatattgttagacctaatagaaattatggcatgcaatttcaaatatgctatacaatataaagaacaatgtgatatcatatttaaataatagaagattagcttagagaggtcgtaaggcatggataatgaaaaaggattgttaatcgttttatcaggaccatctggagtaggtaaaggtactgttagaaaacgaatatttgaagatccaagtacatcatataagtattctatttcaatgacaacacgtcaaatgcgtgaaggtgaagttgatggcgtagattacttttttaaaactagggatgcgtttgaagctttaattaaagatgaccaatttatagaatatgctgaatatgtaggcaactattatggtacaccagttcaatatgttaaagatacaatggacgaaggtcatgatgtatttttagaaattgaagtagaaggtgcaaagcaagttagaaagaaatttccagatgcgttatttattttcttagcacctccaagtttagatcacttgagagagcgattagtaggtagaggaacagaatctgatgagaaaatacaaagtcgtattaacgaagcacgtaaagaagttgaaatgatgaatttatacgattacgttgtagttaatgatgaagtagaacttgcgaagaatagaattcaatgtattgtagaagctgagcacttaaaaagagagcgcgtagaagctaagtatagaaaaatgattttggaggctaaaaaataatgttaaatccaccattaaaccaattaacgtcacaaattaaatcaaagtatttaattgcaacaactgcagcgaaaagagcgcgtgaaattgatgaacaacctgaaactgaattattaagtgaatatcattcatttaaaccagttggtagagcgttagaagaaattgctgacggtaaaattcgccctgttatttcaagcgattattatggtaaagaatagtttcgaccattaaaaatatgtgaagcaagacgtatatcaaatacgtcaaggcatatccaaatcaaacgcacctatgtaggtgtgtttttttagtttatccaatgattgatgttataataatactaaatttgtatctataaaaaagtaatgagcatttgtgcgcatatgatgatgtaaagcgtaaatgtcatagtgatatttaagggagattgaatatgaagaaaatattgttagccgttacaggtggcattgcggcatataaagcgattgatttgacaagtaagttaacacaatctgggtatgaagttcgcgttatgttaacgaatcacgcacaaaaatttgtgacaccattagcatttcaagcaataagtcgaaatgctgtttatacagatacttttatagaagaaaatccttcagaaatacagcatattgcattaggtgattgggcagatgcaatcattgttgcacctgcaacggcaaatacaattgcaaaattgagtgtaggtattgctgatgatttggtgacatcaacgttgctagcaacagagacaccgaaatttattgcgcctgctatgaatgtgcatatgtatgaaaataaacgtacgcagcaaaatattaatattttaaaagaagatgggtatcattttatcgaaccaggaagcggatttctagcatgtggttatgttgctaaaggacgtatggaagaaccgcttcaaatcgtttctgttattgatgctcattttcaaaatagtaatcgtttagctaatagttcatttcaagataaacgcgcattggttacagccggaccaactattgaagttatcgatccagtcagatttgtatccaatcgttcttctggaaaaatgggttatgcaatagctgaagcattgcgaaatcgaggagctatcgtgacattagttactggtcctacaacactagaggatccaaaagatattgaagttattcatgttcaaagtgctgaagaaatgtttgaacaagtgactagccgatttgatgaacaagatattgttgtaaaagcagcagccgtatctgactatacaccggttgatgtattagaacataagatgaaaaagcaggatggtgatttgtcagtatcttttaaacgtactaaagacattcttaaatatttaggtgaacataaaacatcacagtatttaataggctttgcagcagagactgaagatattgaaaattatgcacaacaaaaattacgcaagaaaaatgcagatgtgattatttcaaataatgttggggatatgtctatcggatttagttctgatgataatgaattgacaatgcattttaaaaataatgaaaaagtaaatatcaagaaaggaaaaaaagtagtattagctgcacaaattttagatgaactagaaactaggtggcaataatgatagcgaaagtcatagtcgatgtcgcgtcgaagagcgttgactataaatttgattatataattcctgaacaactcgaatctgtcatccaacctggtgtgcgtgtaattgtaccttttggaccaagaacgattcaaggttatgtaatggaagtaacagcagaacctgatgcacaacttgacgtttcgaagttaaaaaaaatcatagaagtgaaagatatacaaccagaattaacatcagaattaatagctttaagtgagtggatgggttcaactcatatcattaaacgtatttctatgttagaagtgatgcttccgagtgctattaaagcgaagtataaaaaagcatttaagatgaaagatgagatagaggtaccttcagctttattacaaaaatttgataagcatggttactattattataaagatgcccaaaaaaataatgatattcaattgcttatgaagttgttaaaagatgatatcgttgaagaaaaaacgattctcacacaaaatataactaaaaaaactaagcgtgctgttcgtgtcattgaagggtatcatcctgatgaagtattagctaaattggagaaagttattaaacaatacgatttgtatgcttacttgtctgaagaacaacataaaacaatatttttaactgatattgaggatatgggcttttcaaaatccagtttagatggacttatcaaaaaaggttatgttgaaaaatatgacgcggttgttgaaagagacccatttaaagatcgtgttttcgaacaagaatcaaaacagcaattaacagaagaccaatttaaagcatatgaagcgattaaagctaaaattgtaagccaagagcaagaaacatttttacttcatggtgtgacgggttcaggtaaaacagaagtatatttacaaacgatagaagatgttttaagccaaggaaaacaggccatgatgttagttcctgaaatcgctctaacaccgcaaatggttttacgcttcaaacgtcgatttggtgatgacgttgctgtattacattctggcttatctaatggggaacgttatgatgagtggcaaaaaattagggatggtcgtgcgagagtaagtgttggtgcaaggtcaagtgtgttcgcacctttcaaaaatttaggtttaatcattattgatgaagaacatgaatctacatataagcaagaagattatccgagatatcacgctagagaaattgcccaatggcgaagtgaatatcatcactgcccagtcattttaggaagtgcaacaccatgtcttgaaagttatgctcgagctgaaaaaggtgtttatcatttgctatcattaccaaacagagtgaaccaacaagctttacctgaaattgatatagtagatatgcgtgaagaattgagtgaaggtaatcggtcaatgttttcaaaagatttacgtgaagccatacaattaagattagatcgacaggaacaagttgttttatttttaaatcgacgtggttatgcatcatttatgttatgtcgggattgtggttatgtaccgcaatgcccaaactgtgatatttcattaacgtatcataaaacgacagacttattaaaatgtcactattgtggttaccaagagacgccaccgaatcaatgtccaaattgtgagagtgaacacattcgacaagtaggtacaggaacacaaaaagttgaagaactattgcagcaagaatttgaagatgcgcgcataattaggatggatgtagatacaacctcaaagaaaggtgcacatgaaaagttattgactgaattcgaaaaaggtaacggtgacattttactaggtactcagatgattgcgaaaggattagattatccaaatattactttagttggtgtgctgaatgcagatacaatgttaaatttacctgattttcgggcgagtgaacgtacttatcaactattaacgcaagtggctggtagagctggtcgtcatgaaaaggcaggtcaagtcatcattcaaacgtataacccagatcattattcaatattggatgttcaaaaaaatgattatttaacattttatcgtcaggaaatggaatatcgtaaattaggaaagtatccaccgtattattatttgattaatttcacaatctcacataaagaaatgaagaaggttatggaagcatcacagcatgttcataaaattttattacagcatttaacggaaaaagcgcttgtactaggtccatctccggcagcacttgcgagaatcaacaatgaatttagattccaaattttagtgaaatataaaagtgaacctggattattacaagccattcaatttttagatgactattaccatgaaaaatttataaaagaaaaattagcattgaagattgatattgatccacagatgatgatgtaacattactaattattagaaacaagttcagtatgtacgagtatttgaaccagtgtttgaatatttactttaagtacagaaaaagggcagaatatacaactgttaaccatttaaattagcagtttatattctgtctttttatatggctttataacttacgtgattttgatttgattaggaatttattagtattttcatttacgaattctgattttaatgtaagtgccatacttaatgataaacaaaagtactaatgattaagcaaactatttttaaatgccaaattgaaatagtgcaaattttacacttataaattaatggctataaactattttatatctatctatgttttaactacttaaattattagacaaaacaattttcttaaattatcaattaaagtatttaaaaatattgatggttaatgtaaaatatcaatataaataagttttttaaatttatgtatgtttatttgattcaaaaaaataacttaagaggagaaagtttatgaaaaagacactgggatgtttacttttaattatgcttttagtcgtagcaggttgttcttttggtgggaatcataaattatcatcaaagaaatcagaagaatcaaaacaagaaactgtaaaaaaagaatcggaagaagagaaggacccaaaagttgcacactataaaaaaaataaggaaaaaatagcgaaagttaaagcagtacctgttttagaaaagatagaaccatttataaccgaaaagacatttatgaatagcacaggtatgcaagggtggaaagattataagtctttaatgaatcaagtgaagttagcagattataattttacaaaagagtctaaaggtgcttcaatggaagatgttgataagttttttaaaaataaaaaaggtgtaaaacgtaaagaagttactacttatgatggtttgaaacaagttaactattggtatgtagataaaagtggtaaaaaaattggtggttcagacacacctgttttttatgctgaaattttaacgaaatataaagatggaaagttgatttatgcatcagttgaacctggatcatattcatattcaaataagaatgcggtaaatctagataaagttgaagaacttgatgatttaagtatgttctctaatctgaaagatcctaaaccagtaccatatagtgttgctcaaatggaaatatcaagcgtcccagttacaagtgtatctttcgtaacaaagggagggaatcataaagatactaatccagagaaagaacaagttgatatgccacaactagcttatttaactgtttcaccacagctataccatgataaagagcatccagatccgcatataattggattagttgccttgccatacttaaatgcatctagagattttgggaacgcgcattactctgttttaaataatctttcaaaagaaatgaaagagaaattagcgagtcgttcattggaccttaataaatagtgtactacattaaataatcgaaataataatcccgataaacaatcagcattgctgcttatcatatagagttcgtaataactataactctatgattcgcaaataataaatgattgtcatcgggatttatttttatcaatttataaagtgacattaccttgttcatcagcaggtttgaaaacagtaatcactgcactaataattgctaaaatgtgtgggatacctgtccaacagaatattaagtgtagaataccttgcatattcttgccggcataaaatttatgaataccaaaactacctaagaacaatgctaataaaatataaataactttgtttacttgcatttctttccctccagttgaattgcttataatgacattagcttctctttttattatacccacttttagttcaaacattctagtttaagcattcccaatcatctaaatttcagtttttcaatccttacaataaatttaggatttcatttcagttgcattgtattattttacgtgtgaaatatacgtaatgaatcacatgacaatctttaaattgaaaaatatacattctatgatgtaaggtcgcatttttaatatatttacgttataatggtttgatgaattttattgaggagtaagagctatggcgattaaaaagttagtaccagcatcgcatcctattttaacgaaaaaagcgcaagcagttgtaaaatttgatgattcgttaaaaagattattacaagatttagaagatacaatgtatgcacaagaagctgctggcttatgtgcacctcaaattaatcagtcattgcaagtggcaatcattgatatggaaatggaaggattattacaacttgttaatccgaaaattattagtcaatcaaatgaaacgataacagacttagaaggttcaattacattgccagatgtttacggcgaagtgacaagaagtaaaatgatcgttgtcgaaagttatgacgtcaatgggaacaaagttgaactaactgcacatgaagatgtagcaagaatgattttgcatattatagatcaaatgaacggtatcccttttacagaacgtgcggaccgtattttaacagataaagaagtggaggcatattttataaatgactaaaataatatttatgggtacaccagacttttcaacaactgttttagaaatgcttattgcagaacatgatgtcattgcagtcgtaacacaaccagatcgacctgttggacgtaaacgtgttatgacaccaccaccagttaaaaaagttgcaatgaaatatgatttacctgtatatcagcctgaaaaattaagtggatcagaagaattagaacaattgcttcaattagatgtagatttaattgtaactgctgcttttggacaattattacctgaatcattgttggcattaccaaaacttggcgcaattaatgtacatgcatcattgttaccgaagtatagaggtggtgcaccaattcatcaggcgattatcgatggtgaacaagaaaccggcataacaattatgtatatggttaaaaaattagatgcgggtaatattatttcgcaacaagcaattaaaatagaagaaaatgataatgtcggtacgatgcatgataaattaagcgtattaggagcagatttattaaaagaaactttaccatctattatagagggcacaaatgaaagtgtacctcaagatgatacgcaagcaacatttgcttccaatattcgacgcgaagatgagcgaattagctggaataaaccaggaagacaagtgtttaatcaaattcgaggattatcaccgtggccagttgcttatacaactatggatgacactaacttgaaaatatacgatgctgagctcgttgagactaataagataaacgagcctggaacaattatagaaacgactaaaaaagccattattgttgctacaaataataatgaagctgttgcaattaaagatatgcaattggctgggaaaaagagaatgttagctgccaattatttaagtggtgcgcaaaacacactagtagggaagaaacttatatgatagaaaacgtgagaagtcttgcttttgacacgattcaagatatattaaatgaaggtgcgtatagtaacttgcgtatcaatgaagtgttgtcagaaaatgaattaaatgcaatggataaagctttatttacagaaattgtctacggaaccgttaaaagaaaatatacgttagatttttatttaaagccttttgtgaaaacaaagattaaggcatgggttaggcaattattatggatgagtatttatcaatatgtttatttagataaagttccaaatcacgccatcattaatgaagcagttgaaatagcaaaagaacgaggtggctatcacaacggaaatgtcgtaaatggcattttacgaacaatgatgcgtagtgacttacctgattttaataaaattgcagatcctaaaaaaagaatggcaatcgagtatagtatgccgaagtggattatagatcattgggcaacacattatggtctcgaaggaactgaaacaattttacagtcatttttagaaacgacatcaacaactgtgcgtgccaacctgacgcgagcatcattagatgatattattgaaaagttgcaagacgaaggttatgacgttgaaaaagatcatgacttaccttattgtctccatataggaggacaaccaattattcattctcgttcatttaaagatggattcgtttcaattcaagataaaagctcaatgtttgttgcacacattatgaatgtagaccgacatgatcacgtattagatgcatgtagtgcacctggcggtaaggcttgtcacattgctgaagttttaatgccagaagggcaagttgacgcttcagatatacatgatcacaaaatagacttaattaattttaatataaaaaaattacgattaacaaatattaaagcttttcaacatgatgcgacaaaaccttatgataaaacatacgataagatacttgttgatgcaccatgtagcggattaggtgttatgagacacaagccagagattaaatatactcaaagcaaacaacatattgagtcactagttgatttacagcttgaaatattggaaaatgtaaaaaacaatgtaaaaataggtggcgaaatcgtctattcaacatgtacaatagagcaactagaaaatgaaaacgtgatttatacgtttttgaaaaataataaaaacttcgaatttgaaccgtttcaacatccgataactggagagttggtcaaaacgttacaaatcatgccgcaagactttaattcagatggattctttatcactaagataaaaagaaaggacaattaggaatgataactgctgaaaagaaaaagaagaataaatttcttccaaattttgacaagcaatcaatatattcattgcgatttgacgaaatgcaaaactggctcgttgaacaaggtcaacaaaaatttcgagcgaaacagatttttgaatggttatatcaaaaaagagtagattcgattgatgaaatgacgaacttatcgaaagacttacgacagcttttaaaagataactttactgttacaactttaacaactgtagtaaaacaagaaagtaaagacggtacaattaaattcttatttgaattacaagatggctatacaattgaaactgttttaatgagacatgattatggaaattcagtatgtgtaacgacacaagtaggttgtcgtatcggatgtacgttttgtgcttctacacttggcggcttaaaaagaaaccttgaagctggcgaaattgtttcacaagttttaacagttcaaaaagcccttgatgctacagaagagcgcgtatctcaaattgtcataatgggtatcggtgaaccatttgaaaattatgatgaaatgatggacttcttaagaatcgtcaatgatgataacagtttaaatattggtgcacgtcacattacagtatcaacatcaggtatcattcctagaatatatgactttgcggatgaagatattcaaattaattttgctgtaagcttacacgccgcaaaagatgaagtgcgatcacgcttgatgccaattaaccgtgcatataatgttgagaagttaatcgaagcaattcaatattatcaagaaaaaacaaatcgtcgtgttacttttgaatatggtctgtttggtggtgtgaatgaccaactagaacatgcaagagaattagcacatttaataaaaggcttaaactgccatgttaacttaattcctgtcaaccatgttccagaaagaaattatgtaaaaacggctaaaaatgatatctttaaatttgaaaaagaattaaagagactaggaattaatgccacaatacgtcgtgaacaaggttcagatattgacgcagcttgtggtcaattaagagcaaaggaacgacaagtagaaacgaggtaaagacaaatgctagaggcacaattttttactgatactggacaacatagagataagaatgaagatgcgggtggtattttttataatcaaactaatcaacaacttttagttctgtgtgatggtatgggcggccataaagcaggagaagttgcaagtaaatttgttacagatgagttgaaatcccgttttgaagcggaaaatcttatagaacaacatcaagctgaaaattggttgcgtaataatataaaagatataaattttcagttatatcactatgcacaagaaaatgcagaatataaaggtatgggtacaacatgtgtttgtgcacttgtttttgaaaaatcagttgtgatagcaaatgtcggtgattctagagcctatgttattaatagtcgacaaattgaacaaattactagtgatcactcatttgttaatcatcttgttttaacgggtcaaattacgccggaagaagcttttacacatccacaacgtaatattattacgaaggtgatgggcacagataaacgtgtgagtccagatttgtttattaaacgattaaatttttatgattatttattattaaattcagatggattaactgattatgttaaagacaatgaaattaagcgtttgttagtaaaagaaggtacaatagaagatcatggggatcaattaatgcaattggcattagataaccattcgaaagataacgttactttcatactcgcggctattgaaggtgataaagtatgataggaaaaataataaatgaacgatataaaattgtagataagcttggcggcggtggcatgagtactgtttatcttgcagaagatacgatacttaacattaaagttgcaattaaggcgatttttataccacctagagaaaaagaagaaacattaaaacgttttgaacgagaagtacataactcatcacagctatcacatcaaaatatagtaagtatgatcgatgttgatgaagaagatgactgttactacttagtaatggaatatattgaaggtccgactttgtctgagtacattgaaagtcatgggccattaagtattgacacagcgattaattttacgaatcaaatattggatggcattaaacatgcgcatgatatgcgtattgtacatagagatattaagccgcaaaatatattaattgacagcaataaaacgctgaaaatatttgattttggaattgctaaagctttaagtgagacgtctttaactcagactaatcatgtgttaggtactgtgcagtacttttcaccagaacaagcaaaaggtgaggcaacggatgaatgtacagatatttattctataggtattgtgttatatgaaatgcttgttggtgaaccaccatttaatggagaaactgcagttagcattgcgattaaacatattcaggattctgtgccaaatgtgacaacagatgtacgtaaggatattccgcaatctttaagtaatgtcattttacgtgctacagaaaaagacaaagcgaatcgttacaaaacaattcaagaaatgaaagatgatttgagtagtgttttacatgaaaatcgagcgaatgaagatgtctatgaactcgataaaatgaaaacgatagcggtacctttgaaaaaagaagatctagcaaagcatattagtgaacataagtcgaatcaacctaaacgtgaaacgacgcaagtacctattgtaaatgggcctgctcatcatcagcaattccaaaagccagaaggtacggtgtacgaaccaacacctaaaaagaaatcaacacgaaagattgtgctcttatcactaatcttttcgttgttaatgattgcacttgtttcttttgtggcaatggcaatgtttggtaataaatacgaagagacacctgatgtaatcgggaaaactgtaaaagaagcagagcaaatattcaataaaaataacctgaaattgggtaaaatttctagaagttatagtgatcaatatcctgaaaatgaaattattaagacaactcctaatacaggtgaacgtgttgaacgtggtgacagcgttgatgttgttatatcaaaaggccctgaaaaggttaaaatgccaaatgtcattggtttacctaaggaggaagccttgcagaaattaaaatcgttaggtcttaaagatgttacgattgaaaaagtatataataatcaagcaccaaaaggatacattgcaaatcaaagtgtaaccgcaaatactgaaatcgctattcatgattctaatattaaactatatgaatctttaggcattaagcaagtttatgtagaagactttgaacataaatcctttagcaaagctaaaaaagccttagaagaaaaaggatttaaagttgaaagtaaagaagagtatagtgacgatattgatgagggtgatgtaatttctcaatctcctaaagggaaatcagtagatgaggggtcaacgatttcatttgttgtttctaaaggtaaaaaaagcgactcatcagatgtcaaaacgacaactgaatcggtagatgtaccatacactggtaaaaatgataagtcacaaaaagttaaagtttatattaaagataaagataatgacggttcaactgaaaaaggtagtttcgacattactagtgatcaacgtatagacattcctttaagaattgaaaaaggaaaaacagcaagttatattgttaaagttgacggtaaaactgtagctgaaaaagaagtcagttatgatgatatttaaatataattgaagtaaatgtaccgaggtttctatttggaagtctcggtatttttatgttgagattgcggtggttttaaaatgcttcatgtcatcatatacagatgagtattgtctatcaattctgtttcactctcacaatatttatatcatttgaaatgatcatttatatattaattttccagtctttgatataataaatgcagtaaaattaatcgagaggtgccattttgaagacaggtcgaatagtgaaatcaattagtggggtatatcaagtagacgttaatggcgaacgtttcaatacaaaaccacgaggattatttagaaagaaaaaattttcaccggtagttggagatatagtggaatttgatgtacaaaacattaacgaaggctatattcatcaagtgtgtgagcggaaaaatgagttgaaaagaccacctgtaagtaatatagatacactagtaattgtaatgagtgctgtcgagccaaatttttcaacgcaattattagatcgatttttagttattgcacattcgtatcagttaaatgcgagagttttggtgactaaaaaagataaaacaccaattgaaaagcagctcgaaattaatgagttgttgaaaatatatgaaaatattggctatgagactgaatttattgggaatgatgatgatcgaaaaaaaattgtagaagcttggccagcaggacttatagtacttagtggtcaatcaggtgtcggtaagtctactttcttaaatcattatcgtccagaacttaatcttgagacaaatgatatatcaaaatcattaaatcgaggaaagcatactacaagacatgtcgaactattcgaacgtcaaaacggttatattgcagacacacctggattcagtgctttagattttgatcatatagataaagatgaaataaaagattattttcttgaattaaatcgatatggtgaaacatgtaagtttagaaattgtaatcatatcaaagaacctaattgtaatgttaagcatcaattagagatagggaatattgcgcaatttagatacgaccattatttacaactatttaatgaaatttcaaatagaaaggttagatattaaatgacaaaactatatccatcattattatctgttgattttttggatttacaacatgaattaaaacgacttgaagaagcaggtgtcgacggggttcattttgatgttatggatggtcaatttgtgcctaatatatctattggtttaccaatattagatgccgtaagaaaaggcacaacattacctatagacgtacatttgatgattgaaaatccagaaaagtatattgcatcatttgcagaacatggtgccgatatgatttcaattcatgtcgaatcaacgcctcatatccatcgtgctattcaaatgattaaacatttagataaaaaagctggtgtagtaattaatcctggtacaccaatatcacaaattgaacctattttagacattgttgattatgtactagtgatgacagttaacccagggtttggtggtcaatcatttattgatcaatgcgtagaaaaaatagcgggtcttaatgctattaaaatggaacgtcaattaaactttgatattgaagttgatggaggcgtaaataccgatacagcgaaagtttgtgttgaaaatggtgctacaatgctagtaacgggttcatttttctttaaacaagaggattataaaaaagtcacacaagcattgaaaggttgagtgtatatgcatataaatttattatgttctgatcgacacttgccgcaagatatttgggccaaaagtaatgaaggtaaatggggaggcgttgatagaggtgctttgattttattgaagcatcaaattatcccttttttctcagtaggggactttgattcagtcagtaaagaagaatgccaacttctaacagaacagttacaaatcaaacctgttcaagctgaaaaagctgatacggatttagctttagcggttgataaagctgttgcacttggatttgatagtattacaatttatggtgcaacaggcggacgattagatcacttttttggggcaattcagttattattgaaaaaagcatattataaacatgatgttcatatagaagttatcgatcaacaaaataaaattgaattattgcctaaaggtcaacatacagttgaaaaagataagagttatccgtacatttcatttataccgatgactgatgatgtagaactttctctagcaggatttaaatataatttagctagacaaatgcttaatataggttctactttaactatttcaaatgaaattgagtctttgcaagcgaaagtaattgtacatgatgggttgattttgcaaattagaagtacagatttaaattaagtatattcaagtctgtgaagatttttaataaagtgcataagttatttaataaagtgacgtttgtagatagaatttatagcattataatagatgaatcacgctgtaattaatgaagattatggcgtgatttattattgaaaggaaaattgtaggtcctagtacattggtttatgtgccaaaatcgatattgaacccataagtccaatttgacagagaaccattattaaacgttttaaccaaattatattgatatttcgaatttcactatgaaccattatgtattgttttgtaacaaaaaaagaactaagaggttgagctcttagttcttaagtaaatgcgtcctccacataaggtcacattttttatgtgcaatatatttattaaactctagttactttaccagattttaaagcacgtgcagaaacccaaacttttttaggtttaccgtcaactaggattctaactttttgaaggttagcgttccatctacgtttagtagagtttaaagcgtgtgaacgtctgttaccagtcgaagctttacgacctgttacgaaacattgtttacccatatgagtacctcctttaataaatataaatacacataactacttatatacttaactaagatagcatagtttcatttgaaaaacaatgaataattttcacataaaagtcaaaaatactgagttttgtgatataattgtagactgtgaagttatgtagtatgatattttagagaaataagtgaatgaaacatttaaactttttatttaatgatactacatctattaaaagaaaacgcctatagataatcgtcatgagtgtaaattcagtttactcaaaatataataggtgatttaagcgtaagtcattctgataagttgtaccattgatattttataaaaataaacaatgaaacttaaagcgtttatgactacactaagtggtaaaattttaaaagtgattagggaaaacgaataataaactttgaaatttaggagggacaaagatatgacattagagatttcaaatgattacggtaaaattgatatttcaaacgaagtgattgcttcggttgtaggtggaaaggccgttgaatgttatggtattgtaggtatggcatctagacaacaagttagagatggtattgcggaaatactaggacatgaaaattatgctaaaggcatcaaagtaactgaaaataatggcgtagtggatatagatatgtacattattgtaagttatggtgtgaaaatatctgaagttgccaataatgtacaatcaacagtgaaatatactttggaaaaatcacttaatgtatcagtaaattcaatcaatatatatgtacagggtgtacgtgtgaataatacaggcaagaaagcttaggaggacaacttgaaatgattagcaaaattaatggtaaattatttgccgatatgattatacaaggggcacaaaatttatctaacaatgcagatttggtagattctttgaatgtgtatccagtgccagatggtgatacaggaacaaatatgaatcttactatgacttcaggtcgcgaagaagtagagaataatttgtcgaaaaatatcggcgaattaggtaaaacattctcgaaaggtttactaatgggtgcaagaggtaactctggtgtcatcttgtcacaattattcagaggattttgtaaaaatattgaaagtgaatctgaaattaattcaaaattgttagctgaaagttttcaagctggtgttgaaacggcatataaagctgttatgaaaccagttgaaggtacaatacttacagttgcaaaagatgctgcgcaagctgcaatagaaaaagcaaatagtactgaagattgtatagaactaatggagtacattattgtaaaagccaatgaatcacttgaaaacacaccaaacttattagctgtacttaaagaagttggtgttgttgatagtggtggtaaaggtttgttatgcgtttacgaaggtttcttaaaagcgcttaaaggtgaaaaagttgaagccaaagttgcaaagctagataaagatgaatttgtacatgatgaacatgatttccatggtgtaattaatactgaagatattatttatggctattgtactgaaatgatggttcgttttggaaagaataaaaaagcctttgatgaacaagaattcaggcaagatatgagtcaatttggtgattctttattagtcattaatgatgaagaaattgtgaaagttcacgtgcataccgaatacccaggtaaagtgtttaattatggtcaacaatatggtgaattaattaaacttaaggttgaaaatatgagagaacagcatcgtgaagtgattcgaaaagaacagcacacagctaaaccgaaaatggaaacggttgaaacagcaattattactatttctatgggtgaaggtatttcagagatatttaaatcaatgggtgccacacatatcattagtggtggacaaacgatgaatccttctacagaagatatcgttaaagtcattgaacaatcaaaatgtaaacgtgcaattattttaccgaataataaaaatatcttaatggcaagtgaacaagcagcgagtattgttgatgcagaagcagttgttattccaacgaaatctattcctcaaggtataagcgcactattccaatatgatgtggacgcaacacttgaagaaaataaagcgcaaatggctgattcagtaaataacgttaaatctggttcattaacgtacgctgttcgtgatacgaaaattgatggcgttgagattaaaaaagacgcgtttatgggcttaattgaagataagattgtaagcagcaaaagtgatcaattaacaacggttactgagttgttaaatgagatgttagcagaagatagtgaaatattgactgtgattattggtcaagatgcagagcaagcagttacagataacatgataaactggattgaagagcgatatccagatgtagaagtggaagttcatgaaggtggacaaccaatttatcaatatttcttttcagtagaataaaaatttaaaataaaaaactaccaatgataaatcatcaattggtagttttttattttgctattttagtgagatagcgggttaaaagtatcattctcgagttgctaacaatgtcatgttcaacttagtcatgataaaataaataacatactaaatgatacgtaaaatcaaataaaacataggtgatttattttggcgaaagtaaacttaatagaaagtccatattctcttttacaattaaaaggtataggtcctaagaaaatagaagtgttgcaacaactaaatattcatacagtggaagatcttgttctttatttgccaactagatatgaagataatacagtgattgatttgaatcaagcagaagatcaatctaacgttacgatagaaggacaagtatatacagctccagtagttgcattttttggaagaaataaatcaaaattaactgttcatttaatggtaaataatattgctgtcaaatgtatttttttcaatcaaccgtatttaaaaaagaaaatcgaattaaatcaaactataactgttaaaggtaagtggaatagggttaaacaggaaattactggtaatagggttttctttaattcacaaggtacacaaactcaagaaaacgcagatattcaattagaaccagtctatcgtattaaggaaggtattaaacaaaagcaaatacgagaccaaattagacaagcgttaaatgatgtgacaattcatgaatggttaactgatgaactaagagaaaaatataaattagagaccttggactttactttgaacacgttacatcatcctaaaagtaaagaggatttattacgtgctcgtagaacctatgcatttactgaactgtttttattcgaattacgtatgcaatggctaaatagattagaaaagtcatctgacgaagcaattgaaattgattatgacttagaccaagttaaatcatttattgatcgtttaccttttgaactaactgaagcacagaaatccagtgttaatgaaatttttagagatttaaaagcaccaatacgtatgcatcgattacttcaaggtgatgtaggttcaggaaaaacagtagttgctgcaatttgtatgtatgcgttaaaaacggctggctatcaatcagcattgatggtaccaactgaaattttagcagagcaacatgctgaaagtttaattgctttatttggagattctatgaacgttgcgttgttaactgggtcagtaaaaggtaagaaacgaaagatacttttagaacaacttgaaaatggtacgattgattgtttaattggaacccatgctttgattcaagatgatgtaattttccataatgttggtttagtaattacagatgaacaacatcgatttggtgtgaatcaacgccaacttttaagagaaaaaggtgcaatgacgaatgtgttatttatgacagcaaccccgataccaagaacactagcaatatcagtttttggtgagatggatgtgtcttcaattaaacaattaccaaaaggtcgtaaacctatcattactacttgggcaaagcatgagcaatacgataaagttttgatgcaaatgacctcagagttgaaaaaaggtcgtcaagcatatgtcatttgcccgcttatagaaagttctgagcatctcgaagatgttcaaaatgttgtcgcattgtacgagtctttacaacagtattatggtgtttctcgtgtaggattattgcatggtaagttgtctgccgatgaaaaagatgaggtcatgcaaaagtttagtaatcatgagatagatgttttagtttctactactgttgttgaagtaggtgttaatgtaccgaatgcaacttttatgatgatttatgatgcggatcgctttggattatcaactttacatcagttacgcggtcgtgtaggtagaagtgaccagcaaagttactgtgttttaattgcatcccctaaaacagaaacaggaattgaaagaatgacaattatgacacaaacaacggatggatttgaattgagtgaacgagacttagaaatgcgtggtcctggagatttctttggtgttaaacaaagtggattgccagatttcttagttgccaatttagttgaagattatcgtatgttagaagttgctcgtgatgaagcagctgaacttattcaatctggcgtattctttgaaaatacgtatcaacatttacgccattttgttgaagaaaatttattacatcgcagttttgactaattgccatcctgatttgtcaatttaagtgcaacacttcgttaattgagtgatatgacacttgaactatttaaatgtaaagtggtattttaaaaatttataaattttcgactaaataatagctaaataatacagttatttgttgagtcggttaaatagaaagtgttatgatatgtgaggaatgtttaagactaggtactaaaaaatgaggggtgagacgttgaaactaaagaaagataaacgtagagaagcaatcagacaacaaattgatagcaatcccttcatcacagaccatgaactaagcgacttatttcaagtgagtatacaaacaattcgtttagatcgcacttatttaaacataccagaattaaggaagcgtattaaattagttgctgaaaaaaattatgaccaaataagttctattgaagaacaagaatttattggtgatttgattcaagtcaatccaaatgttaaagcgcaatcaattttagatattacatcggattctgtttttcataaaactggaattgcgcgtggtcatgtgctgtttgcacaggcgaattcattatgtgttgcgctaattaagcaaccaacagttttaactcatgagagtagcattcaatttattgaaaaagtaaaattaaatgatacggtaagagcagaagcacgagttgtaaatcaaactgcaaaacatttttacgtcgaagtaaagtcatatgttaaacatacattagttttcaaaggaaattttaaaatgttttatgataagcgaggataaaattatggttaaattagcaattgatatgatgggtggcgacaatgcgcctgatatcgtattagaagccgtacaaaaggctgttgaagactttaaagatctagaaattatactattcggtgacgaaaaaaagtataatctgaaccatgaacgaatcgaatttagacattgttctgaaaagattgaaatggaagatgagcctgttagagcgattaaacgtaaaaaagatagctcaatggtaaaaatggctgaagctgtgaaatctggtgaggcagatggatgtgtgtcagcaggtaatactggtgctttaatgtcagctggtttattcattgttggacgtattaaaggtgtagctagaccggctttagtagtaacattgccaacgattgatggaaaaggttttgtctttttagacgttggtgcaaatgctgatgctaaacctgaacacttattacagtatgcgcaactaggggatatttatgctcaaaaaattagaggtattgataaaccgaaaatctcattattaaatataggtaccgagccagctaaaggtaatagtttaacgaaaaaatcatatgagttattaaatcaagatcattcattgaattttgttgggaatattgaagcgaagacattaatggatggcgatacagatgttgtagttaccgatggctatactgggaacatggtccttaaaaatttagaaggtactgcaaaatcaatcggtaaaatgttaaaagatacgattatgagtagtactaaaaataaattagcaggtgcaatattgaagaaagatttagccgaattcgctaaaaagatggattactcagaatacggtggttccgtattattaggattggaaggtaccgtagttaaagcacacggtagttcaaatgctaaagctttttattctgcaattagacaagcgaaaatcgcaggagagcaaaatattgtacaaacaatgaaagagactgtaggtgaatcaaatgagtaaaacagcaattatttttccgggacaaggtgcccaaaaagttggcatggcacaagatttatataacaacaacgatcaagcaactgaaattttaacttcagcagcaaacacattagactttgatattttagagacaatgtttactgatgaagaaggtaaattgggtgaaactgaaaacacgcaaccagctttattgacgcatagttcggcattattagcagcactaaaaaatttgaatcccgattttactatgggacatagtttaggtgaatattcaagtttagttgcagctgacgtattatcatttgaagatgcagttaaaattgttagaaaacgtggtcaattaatggcacaagcatttcctactggtgtaggaagcatggctgcagtattgggattagattttgataaagtcgatgaaatttgtaagtcattatcatctgatgacaaaataattgaaccagcaaacattaattgcccaggtcaaattgttgtttcaggtcataaagctttaattgatgaactagtagaaaaaggtaaatcattaggcgcaaaacgtgtcatgcctttagcagtatctggcccattccattcatcgctaatgaaagtgattgaagaagatttttcaagttatattaatcaatttgaatggcgtgatgctaagtttcctgtagttcaaaatgtaaatgcgcaaggtgtaactgacaaagaagtaattaaatctaatatggtcaaacaattatattcaccagtacaattcattaattcaacagaatggctaatagaacaaggtgttgatcattttattgaaattggtcctggaaaagttttatctggcttaattaaaaaaataaatagagatgttaagttaacatcaattcaaactttagaagatgtgaaaggatggaatgaaaatgactaagagtgctttagtaacaggtgcatcaagaggaattggacgtagtattgcgttacaattagcagaagaaggatataatgtagcagtaaactatgcaggcagcaaagagaaagctgaagcagtagtcgaagaaatcaaagctaaaggtgttgacagttttgcgattcaagcaaatgttgccgatgctgatgaagttaaagcaatgattaaagaagtagttagccaatttggttctttagatgttttagtaaataatgcaggtattactcgcgataatttattaatgcgtatgaaagaacaagagtgggatgatgttattgacacaaacttaaaaggtgtatttaactgtatccaaaaagcaacaccacaaatgttaagacaacgtagtggtgctatcattaatttatcaagtgttgttggagcagtaggtaatccgggacaagcaaactatgttgcaacaaaagcaggtgttattggtttaactaaatctgcggcgcgtgaattagcatctcgtggtatcactgtaaatgcagttgcacctggttttattgtttctgatatgacagatgctttaagtgatgagcttaaagaacaaatgttgactcaaattccgttagcacgttttggtcaagacacagatattgctaatacagtagcgttcttagcatcagacaaagcaaaatatattacaggtcaaacaatccatgtaaatggtggaatgtacatgtaatatatttgagctaaagctcattgacacagtggttgactggtcatccaatggagaattgcctgacctagtcaactttgcggaggaaattctaagcaaccaagataaggttccagaatttctccctaagaaacagtaatcaataaattgataactgtttctaaaatttctacttgttttttagaatttaaaatgggaaaatataatagtctatgtataggcatttttaaaggaggtgaatcgacgtggaaaatttcgataaagtaaaagatatcatcgttgaccgtttaggtgtagacgctgataaagtaactgaagatgcatctttcaaagatgatttaggcgctgactcacttgatatcgctgaattagtaatggaattagaagacgagtttggtactgaaattcctgatgaagaagctgaaaaaatcaacactgttggtgatgctgttaaatttattaacagtcttgaaaaataataaatcttacatctgggtcgtcagtattgtcgactcagttttttctttaattatcaatagttttaacgtaaaattaaagatgattcaagagcaacacataaaggagataaaataatgtctaaacaaaagaaaagtgagatagttaatcgttttagaaagcgctttgatactaaaatgacagagttaggctttacttatcaaaatattgatttataccaacaagcattttcgcattcgagttttattaatgattttaatatgaatcgtttagaccataatgagcgtttagagtttttgggtgatgcggtattagaattgacggtttcacgatatttatttgataaacatcccaacttgccagaagggaatttaacaaaaatgcgtgccactattgtatgtgagccctcacttgtaatatttgcgaataaaattggattgaacgaaatgattttacttggtaaaggtgaagagaaaacagggggacgtacaagaccatcattaatatcagatgcattcgaagcatttattggggcattgtatttggatcaaggactagatatagtttggaaatttgctgagaaagtcattttcccacatgtagaacaaaatgagttattaggcgtggtagattttaaaacacaattccaagaatatgtgcaccagcaaaataaaggtgatgtaacctataatttaataaaagaagagggaccggcacatcatcgtctattcacttcagaagttattctgcaaggggaagcaatagctgaaggtaaagggaaaacgaaaaaagaatcagaacaacgtgctgctgaaagtgcctataagcaattaaagcaaattaaatagaaatttatatgatacgacatataggtgttcgatttaggatttatggaagaatttttaatattttatggaacaacctcgaaatttaatatacaaatattaaaatatcgtatacgtatgttctttaaaattgtgataaggagtttaggatggtttatttaaaatcaatagatgccattggatttaagtcttttgcagatcaaaccaatgttcaattcgataaaggtgtaactgcaattgttggtccaaatggaagcggtaaaagtaatattacagatgctattaaatgggtgttgggtgaacaatcggctaaatcattacgtggctcaaaaatggaagatattatcttctcaggtgcagaacatcgcaaagctcaaaattatgctgaagtacagttaagattagataatcattctaaaaagctcagtgttgatgaaaacgaagttattgtaacaagaagattgtatcgaagtggtgaaagtgagtactacataaataatgaccgtgcaagattaaaagatattgccgatttatttttagattctggattggggaaagaagcatatagcattatctcgcaaggtagagttgatgaaatactaaatgctaaaccaattgatagacgtcaaattattgaagaatcggctggtgtacttaaatataaaaaacgtaaagctgaatcattaaataaacttgaccaaacagaagataatttaacgagagtagaagacattttatatgatttggaaggtcgcgtagaacctctaaaagaggaggcagctatagctaaagaatataagacactttcacaccaaatgaaacatagtgacattgtagttacagtgcacgatattgatcaatatacaaatgacaatagacaattagatcaacgtttaaatgatttacaaggtcaacaagcaaataaagaagctgacaagcaacgtttaagccaacaaattcaacaatataaaggtaaacgtcatcaacttgataatgatgttgaatcgcttaattatcaattagtaaaagctacggaagcctttgaaaaatatacgggacaattaaatgttttagaagaacgtaagaaaaatcaatctgaaacaaatgcacgatatgaagaagaacaagaaaatttaatggagcttttagaaaatatatcaagtgagatttctgaagctcaagatacttataagtctctgaaaagtaaacaaaaagaactcaatgctgtcattcgtgaacttgaagaacaactatatgtttcagacgaagcacacgatgaaaaattggaagaaattaaaaatgaatactatacattaatgtcagagcaatcagatgttaacaatgatattcgttttttaaagcatactatagaagagaatgaggctaaaaaatcaagactagattctcgattagttgaagtttttgagcaattgaaagatattcagggtcaaataaaaacgactaaaaaagaatatcaacagaccaacaaggaactttctgctgtagataaagaaattaaaaatatagaaaaagaactcactgatacaaaaaaagcacaaaacgaatacgaagagaaattgtatcaagcatatcgatataccgaaaaaatgaaaacacgtattgatagtttggcaacgcaagaggaagaatatacttattttttcaatggcgtcaaacatattttgaaagctaaaaataaagaattaaagggcattcatggtgcagttgcggaaattattgatgtgccatctaaattaactcaggcaattgaaacagcattaggtgcttcattacaacatgtcattgtagattcagaaaaagatggtcgccaggctattcaatttttaaaagaacgtaatttaggtcgtgcgacgtttttaccattaaatgttatacagagtagagtggtagcgactgatattaagtctattgctaaagaggcaaacggatttattagtattgcttcggaagcagtgaaagtagcaccagaatatcaaaatattattgggaatttattaggtaatacgattatcgttgatcatttaaagcatgcaaatgaattggcacgtgcgattaaatatcgaactcgtattgttactttggaaggtgatattgtaaatcctggtggttctatgactggtggtggcgctcgtaagtcaaaaagtattctgtctcaaaaagacgagttgacaacaatgagacaccaattagaagattacttgcgtcaaacagaatcatttgaacaacaatttaaagagttgaagataaaaagcgatcaattaagtgaactgtattttgaaaaaagtcaaaagcataacacacttaaagagcaagtgcatcattttgaaatggagctcgatagattaactacacaagaaacacaaataaaaaatgatcatgaagaattcgaatttgaaaaaaatgatggttatacgagtgacaaaagtcgacaaactttgactgaaaaagaaactcatttagaaagtattaaagcatctttaaaacgactagaagatgaaattgaacgctacacaaaactttctaaagaaggtaaggaaagcgtaactaaaacacaacaaacgttacatcagaaacaatctgatcttgctgtggttaaagagcgtattaaaacacaacaacagacaatagatcgattaaataatcaaagtcaacaaactaaaaatcaattaaatgatgttaaagaaaaaattgcattttttaattcggatgaagtgatgggcgaacaagcttttcaaaatattaaagatcaaattaatggtcaacaagaaacgagaacacgcttagctgatgaattagataaattgaaacaacaacgtattgagttgaatgaacaaatcgatgcgcaagaagctacactacaagtttgtcaccaagatattttagctatcgaaaatcactaccaagatattaaagctgaacaatcaaagctagatgtattaattcatcatgcgatagatcatttaaatgatgaatatcaattgactgttgaacgtgcaaaatctgaatatacgagtgatgaatcgattgacgcattacgtaaaaaagttaaattaatgaagatgtcgattgatgaactaggtcctgtaaacttaaatgcaattgaacaatttgaagagttaaatgaacgttatacatttttaagtgagcaacgtacagatcttcgtaaagctaaagaaacattagagcaaattataagtgaaatggatcaagaggttactgaaagatttaaagaaactttccatgctattcaaggacattttacagctgtgttcaaacaattgtttggtggaggcgatgcagaattgcaattaactgaagccgattatttaacagctggtattgatattgtggtacaaccaccgggtaaaaagttgcaacatttatcgttactaagtggtggtgagcgtgcattaactgctattgctttactatttgcaattttaaaagtaagatctgcaccttttgttatattagatgaggttgaagctgcattagatgaagcgaatgttattagatacgcaaaatatttaaatgagttatcagacgaaacacaattcattgttattacacaccgtaaaggaacaatggaatttgcagataggttatacggtgtaacaatgcaagaatcaggtgttactaaacttgtgagtgtgaatttaaatacaatagatgatgtgttgaaggaggagcaataatgagcttttttaaacgcttaaaagataagtttgcaacaaataaagaaaatgaagaagttaaatccttaacagaagaacaaggtcaagacaaattagaagatacacattctgaaggttcaacgcaggacgtaaatgatttagcagaaaatgctgaagtgaaaaaaaagccacgcaagttgagtgaagcggattttgatgacgatggcttgatatcaattgaagattttgaagaaattgaagctcaaaaaatgggtgctaaatttaaagcaggactcgaaaaatctcgtcaaaatttccaagaacaattaaataatttgatagcgagatatcgtaaagtagatgaagacttttttgaagctttagaagaaatgttaatcactgcagacgtcggttttaatacagtgatgacgttaactgaagaattacgtatggaagcacaacgacgtaatattcaagatactgaagatttgcgtgaagtcattgttgaaaaaatcgtagagatttaccatcaagaagatgataattcagaagctatgaacttagaagatggtcgtttaaatgtcattttaatggttggtgtgaatggtgttggtaaaacaacaacaattgggaaattagcttaccgatataaaatggaaggtaaaaaagtaatgttagctgcgggcgatacttttagagcgggtgctattgatcaattgaaagtttggggcgaacgtgttggtgtagatgtaattagccaaagtgaaggttctgatccagctgctgttatgtatgatgcgattaatgccgctaaaaacaaaggtgttgatattttaatctgtgataccgctggacgtttacaaaataaaacaaatctaatgcaagaattagaaaaagttaagcgtgtaattaatcgagcagtgccagatgcgcctcatgaagcattactatgtttagatgctacaactggtcagaatgcgttgtcacaagctagaaactttaaagaagtaacaaatgttacaggtattgtattaacgaaattagatggtacagccaaaggtggtatcgtattagccattcgtaatgaattgcacattccagttaaatatgtaggtttaggtgagcaattagatgacttacaaccatttaaccctgaaagttatgtctacggcttattcgctgatatgattgaacaaaatgaagaaataacaacagttgaaaatgatcaaattgtaacagaagaaaaggacgataatcatggggcaaaatgatttagttaaaacgttacgaatgaattatttgtttgatttttatcaatccttattgacgaataaacaacgtaattatttggaattattttatctcgaagattattctttaagtgaaatcgcagatacttttaatgtgagtagacaagcagtttatgataatataagaagaactggcgatttagttgaagattatgaaaagaaattggaattataccagaaatttgagcaacgccgagaaatatatgatgaaatgaaaaaacatttaagtaatccagaacaaatacaacgttatattcaacaattagaagacttagaatagatataaattgagggaggacatcgatatggcatttgaaggcttatcagaacgcctgcaagcgacgatgcaaaaaatgcgtggtaagggtaaacttactgaagctgatataaagataatgatgcgtgaagtaagattagcgttacttgaggctgacgtaaactttaaagtggtaaaagaatttattaaaacagtatcagaacgcgcattaggttccgatgtaatgcaatcattaacaccagggcaacaagttattaaaatagttcaagatgaattaacgaagttgatgggtggagaaaatacatcgattaatatgtcaaataaaccacctactgttgttatgatggttggtttacaaggtgctggtaaaacaacaactgcaggtaaattagcattattgatgcgtaaaaaatacaacaaaaaacctatgttagttgcagcagatatttatcgtccagcagcgataaatcaattacaaacagtagggaaacaaattgatattcctgtatacagtgaaggagatcaagtaaagccacaacaaattgtaactaatgcattaaaacatgctaaagaagaacatttagactttgtaattattgatacagcaggtcgattacacatcgatgaagcattgatgaacgaattaaaagaagtaaaagacattgctaaaccaaacgaaattatgttagttgtcgattcaatgacgggtcaagatgctgtcaatgttgcagaatcttttgacgatcaacttgatgtcacaggtgttaccttaactaaattagatggtgatacacgtggtggtgcagctttatctattcgttcggtgacacaaaaaccaattaaatttgttggtatgagtgaaaagttagatggtttagagctattccatcctgaacgtatggcatcacgtattttaggtatgggtgatgtgttaagtttaattgaaaaagcgcaacaagatgtggatcaagaaaaagcaaaagatttagagaaaaagatgcgtgagtcatcatttactttagatgattttttagaacaacttgatcaggtgaaaaatttaggaccactggatgatattatgaaaatgattccaggtatgaataaaatgaaaggtctagataagcttaatatgagtgaaaagcaaattgatcatattaaagcgattatccagtcaatgacgccggctgaaagaaacaatccagacacattgaatgtatcacgtaaaaagcgtattgctaaaggttctggtcgttcattacaagaagtcaatcgtttgatgaaacaatttaacgatatgaagaaaatgatgaaacaattcactggtggcggtaaaggtaaaaaaggtaaacgcaatcaaatgcaaaatatgttaaaaggtatgaatttaccgttttaattattaatttaacacgctgatttttgttgcaattagatgtgcatcccgaaagttatactaaagaatataactttatggggtgcatatttttagatacacaataataattcaaaactgaaatagctgatttgctagaacatgaggttattgttgctaatattaataagttatattggtggaacgtgtgcgttagaagtcgtaccattcatgtccttacgagataaattaactaaacacgtatatggtgaaatttactatgaatttttataacctattaacagtctaatttagtaatcgcatagttatttttgtaagaaaaaggttcaataaatttctaggtaaagaaaaaactctttacaaacattcatacacctgttaatattatttcttgtagaaaataaaaattaaaacatgacttaaaggagattttataaatggcagttaaaattcgtttaacacgtttaggttcaaaaagaaatccattctatcgtatcgtagtagcagatgctcgttctccacgtgacggacgtatcatcgaacaaatcggtacttataacccaacgagcgctaatgctccagagattaaagttgacgaagcgttagctttaaaatggttaaatgatggtgcgaaaccaactgatacagttcacaatatcttatcaaaagaaggtattatgaaaaaatttgacgaacaaaagaaagctaagtaatttagcgtaaaattgttctaacaataagaataactcgtttacactgacagttattactcaatgatacgttgggaatatcacatgttagtaatatagaacgtattgggtaccataatggtgccctttttctttgaattattttcaattaaaatagaagtgttcaaagcatagagttggaggtaatagaatgagagttgaagttggtcaaattgttaacacacatggtattaaaggtgaaattaaagtgaaatccaattcagactttacagacgttcgttttcaacccggtcaagtgctgacagttgtgcataacaataacgaccttaaatatactgttaagtcacatagagtgcataaagggcttcatatgctcacatttgaaggtattaataatattaatgatattgagcatctaaaagggagttctatttatcaagagcgtgatcatgaagatatcgtacttgaggaaaatgaattttattattcagatattataggatgtacagtttttgatgatcaagaaacaccaataggtcgtgtaattaatatatttgaaacaggtgcgaatgatgtgtgggtgattaaaggatctaaagaatatttgattccttatattgctgatgttgtaaaagaagtggatgttgaaaataaaaaaattatcatcacgccaatggaaggattgttggattaatgaaaattgattatttaactttatttcctgaaatgtttgatggtgttttaaatcattcaattatgaaacgtgcccaagaaaacaataaattacaaatcaatacggttaattttagagattatgcaattaacaagcacaatcaagtagatgattatccgtatggtggcggacaaggtatggtgttaaagcctgaacctgtttttaatgcgatggaagacttagatgtcacagaacaaacacgcgttattttaatgtgtccacaaggcgagccattttcacatcagaaagctgttgaattaagcaaggctgaccacattgttttcatatgtgggcattatgaaggttacgatgaacgtatccgaacacatcttgtcacagatgaaatatcaatgggtgactatgttttaacaggtggagaattgccagcgatgaccatgactgatgctattgttagacttattccaggtgttttaggtaatgaacagtcacatcaagacgattcattttctgatgggttattagagtttccgcaatatacacgtccgcgtgaatttaagggtctaacagttccagatgttttattgtctggaaatcatgccaatattgatgcatggagacatgagcaaaagttgatccgcacatataataaaagacctgacttaattgaaaaatatccattaactaatgcagataagcaaatattagaaagatataaaataggattgaaaaaaggttagtattgtgctaacataatctgagtgtggaaacacaaaaatcactatgatccgctgctatatatttgtcgaggcaagaacataggttgaagaggagaatttataatgacaaatcacaaattaatcgaagcagtaactaaatcacaattacgtacagacttaccaagtttccgtcctggtgatactttacgtgtacacgtacgtatcattgagggtactcgtgagcgtatccaagtattcgaaggcgttgtaattaaacgtcgtggcggtggcgtttctgaaacgtttacagttcgtaaaatttcatcaggtgttggcgtggaacgtacattcccattacacacaccaaaaattgaaaaaatcgaagttaaacgtcgtggtaaagtacgtcgtgctaaattatattacttacgtagtttacgtggtaaagctgctagaatccaagaaattcgttaatcagcatttaaacaaagctatgtatgagtcatattcgactcaaacaacaaagccatctagatcacttttatggagtgatctagatggctttttttgctgttttgttaatgtgaagttgataatgtaattgtttttcgcttctttattcataacgtgtttgctcaaaatggttatataaaaaaaatctactaagtgccattgaaaaggacttagtagatttattaaatatatgcgtagcaacattatttttgtcttgcccatctcgtgaaaattatactacatataatgccaaatatagtaattgttataagtaaataatagtatggtggggtatagctcaattgaatctttgttatatttttaggtgctttaatgccggtcataacaccatttacttgttcaactttaagactttgatcacctgatgtcgctttcataccttgattatatgctgttggcaaaacaatatacccagatgaatttttatttttagtaatagtataaccttgctttgtcttactaactttgacagcctctaatgaatttgaagcgtctttaagcgtggtataatcttcgccgtatatcccttttaaatttacacgatacttacctttaggcaatgataatctaatcctatctgaaactttaataagtattgttacgggtgttacaaagcgtcgatatttataagtgagtttatttctttcttgtgtatattcattcactttaacatcatgagctttatccggcgaaagtaattctaaatccatttcaaaatacaaatctttaaattgattagaaactgattttggcaactgtacagttagaccaccattattttgtttaacttgtaataaatgttttgtaggagattgccaggctgcactatttaatttaattgttgaatctgatagtaaatttttattggctttaaaatgtgtatttacatctttagtattgttagaaacaatcccttgcaacattgcttgttctttatctaatggagattttaattctttattggaaaagaccttatttgtaatatgtgcacttggataatggatggtatttttagaatgaatccaacgaactttattgtctttgtgttcagagttaattttaaatccatatggtaagttgtcatcatgattcactctaattcgatcattaacattccaaagtgatagtaaattttgacgattgccaagtagtctataagtgctgtttttatcaattggcatattaatttggagtgtcttgtcataatattttaaaatgtctccatcaaaaatactagaatataatgaaatgccattataatgatatataaatggtgaatttaatgcatagtctgacatataatcaatgcgattaaatgggcctgttgcattttgatttatcttttttataagctggtttacatagttactatggtaatcatgttgtttcaacgttgataatgattgttgataaggtttgattgccatatttttgttgttatctaaaatgacgatttgttgaatcataacgattaatactaatattgcaacggttaattttttataacgccataaactaaattttaaaataacggcaagcaccattagcaggataatacctactataagtgcgagtgggtgtgtcggtgatagtaatacataaagtaatgcgatgatgcttactggtattgttctgattaaataatatttcatatttaatgttgataaatgttgaataaacaatccgcaaagagcacttgatgatagtgctaagatatacacccaacgcctttctggaaatgaaaaaccattaaaagcactgtcgaaatactgtgataatgaaccaataaataatatccatgttactattgcgaaaagtctataaaagtaaaaacgatacagtttgaatgacaataatgcaacgatagtaagaattgaaatcgtaatgaaaaatccatcgctaaagaaaaaataatgataatcaagtggtgtcaaaaatggtatatcaacattgggattttgctttctgtcattttccaaaaacgcagaaatgccagtgaataaaccaaatacacttgataatacactcaatactgtagcagatatgacgcaaattaatttttgtgttctagagacaatgtcatatttgtaagtgaaaatgagtcgatataaatagtagcaacctataataatagcttgataataactgaaataaaaattgctaaatagtgttaaggcaatcgcaacaatgaaaataccgattttgcgttgttgaaaatatctttccaatccaagaatcgataatggcaataaatataataaatttccataaaatgaccaagtaaaattaaagtatataacgacagttgacatgccgtataaaatcgtagcgatcatatttgttgagcgtttaaagtgtaatattttaaataagtagaaggtcacgacaaatgttatgatagctcgtaccatagccataataagttggtttgtcggccaaaaatgtattgttgtcggattaaatataccaactgtttctcctattttaatgaatagaaaattgagccacattaaaggtgacagcgaataataatatgatagtcctttcatataatcgccacctaatccaaacgatgcatcatataaactagaaaaactacttagatgttcatacaaatacatttgaaatggcatcatttgacggaatccatctccagatccactaaaaacagtaccattcacaatatattcatagatatgagtagaaaataaaataagcgttaatattacgctcatgaaagttatgaccaagaattgtttgacgtttgaatttgaccatttttttaacacaacattatcctcaactttcaaatttaaaattaagtttaactgaaactaaagttaatgaggttctcgataggtaaagacaaagatgactgtggaacagataccttatcatagttacttaaactttggattatttttagtttatcattaaacaaatatattgaataataaaaatgtcatactgtattaattgaatatcacctaataagcagcttagatttaataaatgataatttttaattatagaaaacttggaataatcactcatacctaaatctaaagcattgttaagaagtgtgacaatgttaaaataaatatagttgaattaatgaatttgttctataattaacaggttatagattttaataatgagaaaagaattgacgaaagtaaggtgaattgaatggttattcaatggtatccaggacatatggcgaaagccaaaagagaagtaagtgaacaattaaaaaaagtagatgtagtgtttgaactagtagatgcaagaattccatatagttcaagaaaccctatgatagatgaagttattaaccaaaaaccacgtgttgttatattaaataaaaaagatatgtctaatttaaatgagatgtcaaaatgggaacaattttttattgataaaggatactatcctgtatcagtggatgctaagcacggtaaaaatttaaagaaagtggaagctgcagcaattaaggcgactgctgaaaaatttgaacgtgaaaaagcaaaaggacttaagccaagagcgattagagcgatgattgttggaattccaaatgttggtaaatccacattaataaataaattggcaaagcgtagtattgcacagactggtaataaaccaggtgtgaccaaacaacaacaatggattaaagttggtaatgcattacaactattagatacaccagggattctttggcctaaatttgaagatgaagaagtcggtaagaagttgagtttaacaggcgcgattaaagatagtattgtgcacttagatgaagttgccatctatggtctgaactttttaattcaaaatgatttagcacgcttaaaagcacattataaaatcgaagttcctgatgatgcagaaatcatagcgtggtttgatgcgatagggaaaaaacgtggcttaattcgacgtggtaatgaaattgattacgaagcagtcattgaactgattatttatgatattcgaaatgctaaaataggaaattattgttttgatatttttaaagatatgactgaggaattagcaaatgacgctaacaattaaagaagtaacgcagttgattaatgcggttaatacaatagaagaattagaaaatcatgaatgctttttagatgagcgaaaaggtgtacaaaataccatagccagacgaagaaaagcgttagaaaaagaacaaactttaaaagaaaagtatgttgaaatgacttactttgaaaatgaaataataaaagagaatcctaatgctattatttgtggtattgatgaagttggaagaggacctttagcaggtccagtcgttgcatgtgcaacaattttaaattcaaatcacaattatttgggccttgatgactcgaaaaaagtacctgttacgaaacgtttagaattaaatgaagcactaaaaaatgaagttactgcttttgcatatggtatcgcgacagctgaagaaatagatgaatttaatatttataaagcaactcaaatcgccatgcagcgagctattgatggattatcagtacaaccaacgcatttattgatagacgcgatgacgcttgataatgcactgactcaagtatctttaatcaagggtgatgcaagaagtgtatctattgcagctgcaagcatcatggcaaaggtttttcgtgatgattatatgacacagttatctaaagattatcctgaatatggttttgaaaaaaatgcgggttacggtaccaaacaacatttactagcaatcgatgatattggcattatgaaagagcatagaaaaagctttgaacctataaaatcattaatgtaaatcgtaaaattcaattaaatgataaaaaagtagcatttaagtttacaatagcgcttacattttttataattgtaagggaacttaacctaagtaacaggaggatggaagatgaatatccacgagtatcaaggtaaagaaatatttcgttcaatgggcgttgcagttccagaaggacgagtagcatttactgctgaagaagcggtggagaaagcaaaagaattaaattctgatgtatatgttgtaaaagcacaaattcatgctggaggtagaggtaaagcaggcggagtaaaaattgctaaatctttatctgaggtagaaacatatgcaaaagaattattagggaaaactttggtgacacatcaaactggtccagaaggtaaagaaattaagcgtttatatatcgaagaaggttgtgctattcaaaaagaatattacgttggattcgttattgatcgtgcgactgaccaagtaacattgatggcgtctgaagaagggggcactgagattgaagaagttgctgcgaagactcctgaaaagatcttcaaagaaactatcgatccagtaatcggactttcaccattccaagcaagacgaattgcgtttaatattaatattcctaaagaatctgttaacaaagctgctaaattcttattagcactttataatgtattcattgaaaaagattgttcaatcgtagaaatcaacccattagttacaacagctgatggtgatgtattggcattagatgctaaaattaattttgatgataatgcattattcagacataaagatgttgtagaattacgtgatttagaagaagaagatccgaaagagattgaagcgtctaaacatgatttatcatacattgcattagatggtgacatcggatgtatggtgaatggtgcaggtttagccatggcaacaatggatacgattaatcatttcggtggaaacccagccaatttcttagatgcaggcggaagcgctactagagaaaaagtaactgaagcatttaaaatcattttaggtgatgaaaatgttaaaggtatttttgtaaacattttcggtggcattatgaaatgtgatgttatcgcagaaggtatcgttgaagctgtaaaagaagtagatttaactttaccactagttgtacgcttagaaggtacaaatgttgagttaggtaaaaaaatcttaaaagactcaggattagcaattgaaccagcagcaacaatggctgaaggtgcacaaaaaattgttaaactagtcaaagaagcataaggaaaggatgggagcactaagatgagtgtatttatagataagaatactaaagtaatggtacaaggtattacagggtctactgcccttttccatacaaaacaaatgcttgattatggtacgaaaatagtagcaggtgtgacgcctggtaaaggtggtcaagttgttgaaggcgttcctgttttcaacactgttgaagaagctaaaaatgaaactggggcaacggtttcagtcatttacgttccagcaccatttgctgcagactcaattttagaagcagctgatgcagacttagatatggttatttgtatcactgaacatattcctgtattagacatggttaaagttaaacgctacttacaaggtagaaaaacacgtttagttggtccaaactgtccaggtgtgattacagcagatgaatgtaaaattggtattatgcctggctatattcacaaaaaaggtcatgttggcgtagtatcacgttcaggtacactaacatatgaagcagtgcaccaattgactgaagaaggtattggtcaaactacagctgttggtattggtggagacccagtcaacggaacaaactttattgatgttttaaaagcattcaatgaagatgacgaaacgaaagcagttgttatgattggtgaaatcggtggtacagctgaagaagaagcagctgaatggattaaagcgaatatgacaaaaccagttgtaggctttatcggtggacaaacagcacctcctggaaaacgtatgggacatgctggtgcaatcatttcaggtggtaaaggtactgctgaagaaaaaattaaaacattaaatagttgtggtgtgaaaacagcggcaacaccttcagaaattggttcaacattaattgaagctgctaaagaagcaggtatttatgaatcattattaacagttaataaataaagttaaaagatgatataaatggctatagcccattccgatactttataaaagtatcggaaatgggctatttgtcgtgcgatgaattttagtacgcttttcatattttgaaaaggcaagttaattattttacctccttcaatagctttctaaaacaaagcaaattttttattagaatatatagtgcactatgttataatatttatatattattgtaaggagtgtttcatcatgaataaacaacaaagtaaagtacgctattcaattagaaaagttagtattggaattttgtcaatttcaataggtatgtttttggcattgggtatgtcgaacaaagcatatgcagatgaaattgataaatctaaagattttacaagagcgtatgagcaaaatgtattcgcgaaatcagagttaaatgctaataaaaatacgacaaaagacaaaataaaaaatgaagctgttgttaaaacatcggacacaagtttaaagttagacaacaaatcagcaatttcaaatggaaatgaaattaatcaagatataaagatttcaaatactccgaaaaactcaagccaaggtaacaatctagttgttaataacaatgaacctactaaagaaattaaaattgcaaacttggaagctcaaaattctaatcagaagaaagtgaataaaggtactaataattactttagttactaaagttttagagaagctccaaaaacacaaatctatactgtaaaaaaaggtgacacacttagtgctatagcattaaaatacaaaactacagtttcaaatattcaaaatacaaataatatagcaaatcctaatttaatatttattggtcaaaaattaaaagtgccaatgacaccattagtagaaccaaaaccaaaaacagtgtcttcaaataataaaagtaatagtaataacagtacattaaattatttgaaaacattagagaatagaggatgggatttcgacggtagttatggatggcaatgtttcgatttagtcaatgtatattggaatcatctttatggtcatggattaaaaggatatggagctaaagatataccatatgcaaataattttaatagtgaagctaaaatttatcacaacacaccaactttcaaagctgaacctggggacttagtggtttttagtggaagatttggtggaggatatggtcatacagctattgtcttaaatggtgattatgatggaaaattaatgaagttccaaagtttagatcaaaactggaataatggtggatggcgtaaagcagaggttgcacataaagttgttcataattatgaaaatgatatgatttttattagaccatttaaaaaagcataatttaaatcgaaggcaggacattgaaatatgaaattttcaactttaagtgaagaagaatttaccaactacaccaaaaagcacttcaaacattatacacagtctatagaattatataattatagaaataaaataaatcatgaagcacatattgtgggagtgaagaatgataaaaatgaagttatagctgcatgtttattaacagaggcacgtatttttaaattctacaaatatttctactctcatagaggtcctttacttgattatttcgatgctaaattagtttgttacttttttaaagaattatctaaattcatttataaaaatagaggagtatttattcttgttgatccatatttaatagagaatttaagagatgcaaatggtaggataataaagaattataataattcagtgatagtaaagatgctagggaaaattgggtatctccatcaaggttatacaacaggatattcaaataaaagtcaaattaggtggatttctgtattggatttaaaagataaagatgagaatcaacttttaaaagaaatggaatatcaaactagaagaaatataaaaaagactattgagattggtgtcaaggttgaagatttatctattgaagaaacaaatcgattttataaattgtttcaaatggctgaagaaaaacatggttttcatttcatgaatgaagattattttaaacgaatgcaagaaatatataaagataaggcaatgttaaagatagcttgtatagatcttaatgaatatcaagataaattaaaaatacaattattgaaaatcaaaaatgaaatgatgactgtgaacagagcattaaatgaaaatccaaattctaaaaagaataaatcaaaattaaatcagttaaatatgcaattatctagtattaataatagaattagtaaaaccgaagaactaatattagaagatgggcctgttttggatttagctgctgctttatttatatgtactgatgatgaagtttattatctatcaagtggatcaaatcctaaatataatcagtatatgggcgcatatcatctacaatggcatatgataaaatatgcaaaatcacataatattaataggtataatttttatggaataacaggcgtctttagtaatgaggcggatgattttggtgtacaacaatttaaaaaaggttttaatgcacatgttgaagaattaattggtgatttcatcaaaccagtaagaccaattctatataaatttgcaaaacttatttataaggtttgattataaagtatgttggaaattgaaatttaaaattctttccaacatacttttcactttttaagtcggtattttactccttaaaataacattacatcgacaatgtttttgtattagaaatgtaaaacaaaaatagaatatgattttgtatgattaaaaaaaggagttgatttattgattagactatttttgcttaagttatactgggcacacttttcgactaaacaaattcatcaatttttaatggcatatcctaatgtaattaaagaggggggcagaaaaaaagatagttatttatgtgaatgggtgaatagggaagaaaatgttcatttattacgtaaatactatgcttttataaaacttaatcataacgatattattaaagaactgcagaaattaaaagtaagttacattacatatatggatactgaatacccagtgctattaaaagaaatatatcaatttccattacttcttttctataaaggaaacatcaaattaataaataatatgcatcatttggcagtagtaggtgcaagagattctacaagttatacccaacagtctttagaatttttattatcaaatgataaaagcaaatatttaacaattgtttccggccttgctcaaggagctgatgcaatggcacatcaaatagctttaaaatacaatctccctacaatagcagttttagcctttggccatcaaacgcattatcccaaaagtacattagcattaagaaataaaatagaagaaaaaggtttagttatatccgaatatccaccacatacaccaattgctaaatatagatttcctgagcgcaatagaattatcagcggtttgtcaaaaggggttttaattactgaggctaaggaacaaagtggcagtcacatcacgatagattttgcattagagcaaaatagaaatgtttatgttttacctggatctatgtttaatcctatgacaaaaggtaatttattacgtatccaagaaggagctaaggtagtattaaacgctaatgatatatttgaagactactatatttaaaactaaaaataacgagttgcttcatatttcttttgttaccctttgtaatttattttttaataaaatctataaaaaatagacaaggaaaatgatttgtttagatataaaacgttgacaaaagcaaaattaagcgtttatcatttatctttagtaattagattagcgagggggaaatgacattggcagataatttagtcattgttgaatcgcctgcaaaagcaaaaaccattgaaaagtatttaggtaagaaatataaagttatagcttcaatgggacacgtcagagacttaccaagaagtcaaatgggtgtcgacactgaagataattacgaaccaaaatatataacaatacgcggaaaaggtcctgttgtaaaagaattgaaaaaacatgcaaaaaaagcgaaaaacgtctttctcgcaagtgaccccgaccgtgaaggtgaagcaattgcttggcatttatcaaaaattttagagcttgaagattctaaagaaaatcgcgttgttttcaacgaaataactaaagacgctgttaaagaaagttttaaaaatcctagagaaattgaaatgaacttagtcgatgcacaacaagcgcgtcgaatattagatagattggttggctataacatctcgccagttctatggaaaaaagtaaaaaaagggttgtcagcgggtcgagttcaatctgttgcacttcgtttagtcattgaccgtgaaaatgaaatacgaaactttaaaccagaagaatattggactattgatggagaatttagatacaaaaaatcaaaattcaatgctaaattccttcattataaaaataaaccttttaaattaaaaacgaaaaaagatgttgagaaaattacagctgcattagatggagatcaattcgaaattacaaacgtgactaaaaaagaaaaaacgcgtaatccagcaaacccatttacaacttctacattacaacaagaggcggcacgtaaattaaactttaaagctagaaaaacaatgatggtcgcacaacaattatatgaaggtatagatttgaaaaaacaaggtacgattggtttaataacatatatgagaaccgattctacgcgtatttcagatactgccaaagctgaagcaaaacagtatataactgataaatacggtgaatcttacacttctaaacgtaaagcatcagggaaacaaggtgaccaagatgcccatgaggctattagaccttcaagtactatgcgtacgccagatgatatgaagtcatttttgacgaaagaccaataccgattatacaaattaatttgggaacgatttgttgctagtcaaatggctccagcaatacttgatacagtctcattagatataacacaaggtgacattaaatttagagcgaatggtcaaacaatcaagtttaaaggatttatgacactttatgtagaaactaaagatgatagtgatagcgaaaaggaaaataaactgcctaaattagagcaaggtgataaagtcacagcaactcaaattgaaccagctcaacactatactcaaccacctccaagatatactgaggcgagattagtaaaaacactagaagaattgaaaattgggcgaccatcaacttatgcaccgacaatagatacgattcaaaagcgtaactatgtcaaattagaaagtaagcgttttgttcctactgagttgggagaaatagttcatgaacaagtgaaagaatacttcccagagattattgatgtggaattcacagtgaatatggaaacgttacttgataagattgcagaaggcgacattacatggagaaaagtaatcgacggtttctttagtagttttaaacaagatgttgaacgtgctgaagaagagatggaaaagattgaaatcaaagatgagccagccggtgaagactgtgaagtttgtggttctcctatggttataaaaatgggacgctatggtaagtttatggcttgctcaaacttcccggattgtcgtaatactaaagcgatagttaagtcaattggtgttaaatgtccaaaatgtaatgatggtgacgtcgtagaaagaaaatctaaaaagaatcgtgtcttttatggatgttcgaaatatcctgaatgcgactttatctcttgggataagccgattggaagagattgtccaaaatgtaaccaatatcttgttgaaaataaaaaaggtaagacaacacaagtaatatgttcaaattgcgattataaagaggcagcgcagaaataatatttttatttcctagagacattttaagatagttaaatagaatcattagtgaatcttattttaaagatagtaatggattaatctaaataagtgcggataatattaacataacaacataattaaaagacataaatgacaataaaaggagtatagaaatgactcaaactgtaaatgtaataggtgctggtcttgccggttcagaagcggcatatcaattagctgaaagaggaattaaagttaatctaatagagatgagacctgttaaacaaacaccagcacaccatactgataaatttgcggaacttgtatgttccaattcattacgtggaaatgctttaactaatggtgtgggtgttttaaaagaagaaatgagaagattgaattctataattattgaagcggctgataaggcacgagttccagctggtggtgcattagcagttgatagacacgatttttcaggttatattactgaaacactcaaaaatcatgaaaatatcacagttattaatgaagaaattaatgccattccagatggatacacaattatcgcaacaggaccacttactacagaaacgcttgcgcaagaaatagtggacattactggtaaagatcaactttatttctatgatgcggctgctccaattattgaaaaagaatctattgatatggataaagtttacttaaagtcccgttatgataaaggtgaagctgcatatttaaactgtcctatgactgaagatgaatttaatcgcttttatgatgcagtattagaagctgaagttgcacctgtaaattcatttgaaaaagaaaaatatttcgagggttgtatgccttttgaagtaatggcagaacgcgggcgcaagacattactatttggaccaatgaaaccagtaggattagaagatccaaagactgggaaacgtccttatgcagtggttcaattaagacaagatgacgctgctggcacactctacaatattgtcggcttccaaacacatttaaaatggggagctcaaaaagaagtcattaaattaattccaggcttagaaaatgttgatattgttagatatggtgtgatgcatagaaataccttcattaactcaccggacgtattaaacgagaaatatgaattgatttcacaaccaaacatacagtttgcaggacaaatgactggtgttgaaggttacgtagaaagcgcagctagcggcttagttgcaggcatcaatcttgcgcataaaatattgggcaaagctgaggtagtatttccgagagaaactatgattggaagtatggcttactatatttctcatgctaaaaataataagaatttccaacctatgaatgctaacttcgggttattaccatctttagaaactagaattaaagataaaaaagaacgctatgaagcacaagctaatagagctttggattacttagaaaatttcaaaaaaactttataaaatagttagaaagactagatatgctattcattcttaagtcatcaacgagtaagtaatgactttctaaatggaaaatacttatcctagtctttttaattttggaattgttacgtatttctgacaatttagaattcgtattcaaaaaaatatctaaataaataacacgcaataagttgattgatgtaacatgtaagagaatgttttaaataaactttatttaaaagacaatgaaataataaatggcaaggctattaataaagacttttagtaattaatttaaaaaagaggtattctaattaacaggttttccgattagttacaattatttaattctcaaaagatttagaattgattatcaaattactgtaagccctttgctgtatatgctacaattcttattgatggagggtaaatgtattgaatcatattcaagaagcgtttttaaatacattgaaagttgaacggaatttttcggaacatacattgaaatcatatcaagatgacttaattcagtttaatcaatttttagaacaagaacatttacagttgaatacttttgaatacaaagatgctagaaattatttgagctatttatattcaaatcatttgaaaagaacatctgtttctcgtaaaatctcaacgttaagaactttctatgaatattggatgacgcttgatgagaacattattaatccatttgttcaattagtacatccgaaaaaagaaaaatatcttccgcaattcttttacgaagaagaaatggaagcgttatttaaaactgtagaagaggacccttcaaaaagtttacgggatcgagttattcttgaattgttatatgctacaggtatccgtgtttcggaattagttaatattaaaaaacaagatatagatttttacgcgaatggtgttaccgtattaggaaaagggagcaaagagcgttttgtaccgtttggtgcttattgtagacaaagcatcgaaaattatttagaacatttcaaaccaattcagtcatgcaatcatgattttcttattgtaaatatgaagggtgaagcaatcactgaacgcggtgtacgatatgttttaaatgatattgttaaacgaactgcaggcgtaagtgagattcatccccacaagctcagacatacatttgcaacgcatttattgaatcaaggtgcagacctaagaacagtacaatcgttattaggtcatgttaatttgtcaacaactggtaaatatacacacgtatctaaccaacaattaagaaaagtgtatctaaatgcacatcctcgagcgaaaaaggagaatgaaacatgagtaatacaacattacatgcaacaacaatttatgctgtaagacataatgggaaagcagctatggctggagatgggcaagtaacgcttggtcaacaagtcatcatgaaacaaacggctagaaaagtgcgacgtttatatgaaggtaaagtgttagctggtttcgcaggtagtgtagcagatgcgtttacgttatttgaaaaattcgaaacaaaattacaacagtttagtggtaacttagaaagagctgctgttgaattggcacaagaatggcgaggcgataaacaattacgtcaattagaagctatgctaattgtaatggataaagatgctattttagttgtcagtggaactggcgaagttattgccccagatgatgaccttatcgctataggatcaggaggcaactacgcattaagcgcaggacgtgcattgaaacgccatgcatcgcatttgtctgctgaagaaatggcatatgagagcttgaaagtagcggctgatatttgtgtctttaccaacgataatattgttgttgaaacactataataatcagagcacgataaataattacgatcaattaattttagttaaaagacggaggaatgaaattaatggatacagctggaataagattaactccaaaagaaatcgtatctaaattaaatgaatacatcgttggacaaaatgatgctaaacgtaaagtggcaattgccctacgtaatcgatacagaagaagtttattagatgaggaatcaaagcaagaaatttcacctaaaaatattttgatgattggaccaacaggcgttggtaaaactgaaattgcaagaagaatggccaaagttgtcggcgcgccatttataaaagtagaagctactaaatttactgaggtaggttatgtaggacgagatgttgaaagtatggttagagatcttgttgatgtttcagtaagattagtcaaggcgcagaaaaaatcattggtacaagatgaagcaacagctaaggccaatgaaaaacttgttaagttattagttccaagtatgaaaaagaaagcgtctcaaacgaataatcctttagagtcacttttcggaggtgcaattccaaatttcggacaaaataatgaagatgaagaagaaccacctactgaggaaattaaaacaaaacgttctgaaattaagagacagctagaagaaggcaaacttgaaaaagaaaaggtaagaattaaagtagaacaagatcctggtgctttaggaatgctaggtacaaatcaaaatcagcaaatgcaagagatgatgaatcaattaatgcctaaaaagaaagttgagcgagaagttgctgttgagacggcaaggaaaatcttagctgatagttatgcggatgaactaattgaccaagaaagcgctaatcaagaagcgcttgaattagcagaacaaatgggtatcatctttatagatgaaatcgacaaagttgcgacgaataatcataatagtggtcaagatgtctcaagacaaggtgttcaaagagatattttacctatacttgaaggtagcgttattcaaaccaaatatggtactgtgaatactgaacatatgctgtttataggtgctggagctttccatgtatctaagccgagtgacttgataccagaattgcaaggtcgttttccgattagagttgaacttgatagtttatcggtagaagattttgtaagaattttgacagaaccaaaattgtcattaattaaacaatatgaagcattgcttcaaacagaagaagttactgtaaactttacggatgaagcaattactcgcttagctgagattgcttatcaagtaaatcaagatacagacaacattggtgcacgtcgacttcatacaattttagaaaagatgctagaagatttatcattcgaagcaccaagtatgccgaatgcagttgtagatattaccccacaatatgttgatgataaattaaaatcaatttcaacaaacaaagatttaagtgcatttattctataaaaatatacaaaaggagaaaaattcatgagcttattatctaaaacgagagagttaaacacgttacttcaaaaacacaaaggtattgcggttgattttaaagatgtagcacaaacgattagtagcgtaactgtaacaaatgtatttattgtatcgcgtcgaggtaaaattttaggatcgagtctaaatgaattattaaaaagtcaaagaattattcaaatgttggaagaaagacatattccaagtgaatatacagaacgattaatggaagttaaacaaacagaatcaaatattgatatcgacaatgtattaacagttttcccacctgaaaataaagagttgtttattgatagtcgtacaactatcttcccaattttaggtggaggagaaagattaggtacattagtacttggtcgagtacatgatgattttaatgaaaatgatttggtattaggtgaatatgctgctacagttattggtatggaaatcttacgtgagaagcatagcgaagtagaaaaagaagcgcgcgataaagctgctattacaatggcaattaattcattatcttattctgaaaaagaagcaattgaacatatctttgaagaacttggcggtacggaaggcctattaatcgcatcaaaagttgcagatagagttggtattactagatctgtaattgtaaatgcactacgtaaattagaaagtgctggtgtaattgaatcacgttctttaggaatgaaaggtactttcattaaagttaaaaaagaaaaattcttagatgaattagaaaaaagtaagtaagtcgatgagtctgggatataattcaatgtcctagtcgtgacgatgttatcttggcagtagtcaacgaaatgactttgatgattatgttgaagtcatttctttatttttgtctaatttccaatcaaattgatattccacattaacatgatagaattacctttaaatttatgaaaaaatgcttgaaaaacatttgctttagacacggcattatgttatatttattttcggctataaagccaatacacacatatcaaacgtgattgtgtaaagggtgcaatatttgtatattgtctttacattagtttgctatggaggtaattaaccaataggaggaatttataatggcagtaatttcaatgaaacaattactagaagcgggtgttcacttcggccaccaaacacgtcgttggaacccaaaaatgaaaaaatatatcttcactgaaagaaatggtatttatatcatcgacttacaaaaaacagtgaaaaaagtagacgaggcatacaacttcttgaaacaagtttcagaagatggtggacaagtcttattcgtaggaactaaaaaacaagcacaagaatcagttaaatctgaagcagaacgtgctggtcaattctacattaaccaaagatggttaggtggattattaactaactataaaacgatctcaaaacgaatcaaacgtatttctgaaattgaaaaaatggaagaagatggtttattcgaagtattacctaaaaaagaagtagtagaacttaaaaaagaatacgaccgtttaatcaaattcttaggcggaattcgtgatatgaaatcaatgcctcaagcattattcgtagttgacccacgtaaagagcgtaatgcaattgctgaagctcgtaaattaaatattcctatcgtaggtatcgttgacactaactgtgatcctgacgaaattgactacgttatcccagcaaacgacgatgctatccgtgcggttaaattattaactgctaaaatggcagatgcaatcttagaaggtcaacaaggcgtttctaatgaagaagtagctgcagaacaaaacatcgatttagatgaaaaagaaaaatcagaagaaacagaagcaactgaagaataatcaactgttgaatctgacttagatatagtttaaatgggtgataagatattaatgcttatcaccttttttaaaaagaaaatcgaggcaaattacaaatattcaattagagtattggcaatcttgcctataataatgctaaaatcataatatataaaatgataacttattggaggaataatgaatggcaactatttcagcaaaacttgttaaagaattacgtgaaaaaactggcgcgggtatgatggattgtaaaaaagcgctaactgaaactgatggtgacatcgataaagcgattgattacctacgtgaaaaaggtattgctaaagcagctaaaaaagcagaccgtattgcggctgaaggtttagtacatgtagaaactaaaggtaacgatgcagttatcgttgaaatcaactctgaaacagactttgttgctcgtaacgaaggtttccaagagttagttaaagaaatcgctaatcaagtattagatacaaaagctgaaactgttgaagctttaatggaaacaactttaccaaatggtaaatcagttgatgaaagaattaaagaagcaatttcaacaatcggtgaaaaattaagtgttcgtcgttttgctatcagaactaaaactgataacgatgctttcggtgcttacttacacatgggtggacgcattggtgtattaacagttgttgaaggttcaactgacgaagaagcagcaagagacgttgctatgcatatcgctgcaatcaaccctaaatatgtttcttctgaacaagttagcgaagaagaaatcaaccacgaaagagaagttttaaaacaacaagcattaaatgaaggtaaaccagaaaacatcgttgaaaaaatggtggaaggacgtttacgtaaatacttacaagaaatttgtgctgtagatcaagacttcgttaaaaaccctgatgtaacagttgaagctttcttaaaaacaaaaggtggaaaacttgttgacttcgtacgctatgaagtaggcgaaggtatggaaaaacgcgaagaaaactttgcggatgaagttaaaggacaaatgaaataatctgtcataaagtaaaacaaggaagaagacacctttaatgttgctttattaaaatgtaaatcattctaataaaacaacaactgtgtcttctttacttgtatatgttacatatattcacgatagagaggataagaaaatggctcaaatttctaaatataaacgtgtagttttgaaactaagtggtgaagcgttagctggagaaaaaggatttggcataaatccagtagttattaaaagtgttgctgagcaagtggctgaagttgctaaaatggactgtgaaatcgcagtaatcgttggtggcggaaacatttggagaggtaaaacaggtagtgacttaggtatggaccgtggaactgctgattacatgggtatgcttgcaactgtaatgaatgccttagcattacaagatagtttagaacaattggattgtgatacacgagtattaacatctattgaaatgaagcaagtggctgaaccttatattcgtcgtcgtgcaattagacacttagaaaagaaacgtgtagttatttttgctgcaggtattggaaacccatacttctctacagatactacagcggcattacgtgctgcagaagttgaagcagatgttattttaatgggcaaaaataatgtagatggtgtatattctgcagatcctaaagtaaacaaagatgcggttaaatatgaacatttaacgcatattcaaatgcttcaagaaggtttacaagtaatggattcaacagcatcctcattctgtatggataataacattccgttaactgttttctctattatggaagaaggaaatattaaacgtgctgttatgggtgaaaagataggtacgttaattacaaaataaatttagaggtgtaaaataatgagtgacattattaatgaaactaaatcaagaatgcaaaaatcaatcgaaagcttatcacgtgaattagcgaacatcagtgcaggaagagctaattcaaatttattaaacggcgtaacagttgattactatggtgcaccaacacctgtacaacaattagcaagcatcaatgttccagaagcacgtttacttgttatttctccatacgacaaaagttctgtagctgacatcgaaaaagcgataatagcagctaacttaggtgtcaacccaacaagtgatggcgaagtgatacgtattgcagtacctgccttaacagaagaacgtagaaaagagcgcgttaaagatgttaagaaaattggtgaagaagctaaagtatctgttcgaaatattcgtcgtgatatgaatgatcagttgaaaaaagatgaaaaaaatggcgacattactgaagatgagttgagaagtggtactgaagatgttcagaaagcaacagacaattcaataaaagaaattgatcaaatgattgctgataaagaaaaagatattatgtcagtataaaactaatatacaatgacatattaaaatgccagtattaaacgataatgtaacatttaaaatgggcatgtttaattaaatcaaagatgcatgtgataatttaaattcacaatgagcataaaatggtgtttaaacaagttaattaaacatatactttataaataataggcattaggtatattgctataataaagttatgtaatttttaacctcagtatgtatgtcacatttctggtgtaaactgtaccgagtcagactttggtacagtttttttatttgcttattcaatgcattaaatgagtatgataaaatgataatgattgtttagtaacttatactatatgacagagatgatcaggctcggaggaaagaccatgtttaaaaagctaataaataaaaagaacactataaataattataatgaagaattagactcgtctaatatacctgaacatatcgctattattatggatggtaatgggcgatgggctaagaagcgaaaaatgcctagaattaaaggtcattacgaaggtatgcaaacaataaaaaaaattactagggtagctagtgatattggtgttaagtacttaactttatatgccttttccactgaaaattggtcaagacctgaaagtgaagtaaattatattatgaatttgcctgtcaatttcttaaagacatttttaccggaactaattgaaaaaaatgtcaaagttgaaacaattggatttactgataagttgccaaaatcaacgatagaagcaataaataatgctaaagaaaagacagctaataataccggcttaaaattaatatttgcaattaattatggtggcagagcagaacttgttcatagtattaaaaatatgtttgacgagcttcatcaacaaggtttgaatagtgatatcatagatgaaacatatataaacaatcatttaatgacaaaagactatcctgatccagagttgttaattcgtacttcaggagaacaaagaataagtaatttcttgatttggcaagtttcgtatagtgaatttatctttaatcaaaaattatggcctgactttgacgaagatgaattaattaaatgtattaaaatttatcagtcacgtcaaagacgctttggcggattgagtgaggagtagtatagtatgaaagttagaacgctgacagctattattgccttaatcgtattcttgcctatcttgttaaaaggcggccttgtgttaatgatatttgctaatatattagcattgattgcattaaaagaattgttgaatatgaatatgattaaatttgtttcagttcctggtttaattagtgcagttggtcttatcattattatgttgccacaacatgcaggaccatgggtacaagtaattcaattaaaaagtttaattgcaatgagctttattgtattaagttatactgtcttatctaaaaacagatttagttttatggatgctgcattttgcttaatgtctgtggcttatgtaggcattggttttatgttcttttatgaaacgagatcagaaggattacattacatattatatgcctttttaattgtttggcttacagatacaggggcttacttatttggtaaaatgatgggtaaacataagctttggccagtaataagtccgaataaaacaatcgaaggattcataggtggcttgttctgtagtttgatagtgcctcttgcaatgttatattttgtagatttcaatatgaatgtatggatattacttggagtgacattgattttaagtttatttggtcaattaggtgatttagtggaatcaggatttaagcgtcatttcggcgttaaagactcaggtcgaatactacctggacacggtggtattttagaccgatttgacagctttatgtttgtgttaccattattaaatattttattaatacaatcttaatgctgagaacaaatcaataaacgtaaagaggagttgctgagataatttaatgaatctcagaactccttttgaaaattatacgcattattaactttgaaaattagacgttatattttgtgatttgtcagtatcatattataatgacttatgttacgtatacagcaatcatttttaaaataaaagaaatttataaacaatcgaggtgtagcgagtgagctatttagttacaataattgcatttattattgtttttggtgtactagtaaccgttcatgaatatggccatatgttttttgcgaaaagagcaggcattatgtgtccagaatttgcgatcggtatggggccgaaaatttttagttttagaaaaaatgaaacactttacactattaggttattgcctgttggtggatatgttcgtatggcaggagatggcttagaagagccaccagtcgagcctggtatgaacgttaaaattaaactgaatgaagaaaatgaaataacacatatcatattagatgatcatcataagtttcaacaaattgaagcgatcgaagttaaaaaatgtgattttaaagacgacttattcatagaaggtattactgcttatgataatgaaagacatcattttaaaattgctagaaagtctttctttgttgaaaatggtagcttagttcaaattgctccgagagacagacagtttgcacataaaaagccatggccgaaatttttaacattatttgcaggaccgttatttaactttatattagctttagtcctatttattggtcttgcttattatcaaggtacacctacgtctactgtagaacaagtcgcagataagtatccagctcaacaagcaggcttacaaaaaggcgataaaattgtccaaattggcaaatataaaatatctgaatttgatgatgttgataaggcgttagataaagttaaagataataagacgactgttaaatttgaacgtaatggtaaaacaaagtcagttgaattaacacctaaaaagactgaaagaaaactgactaaagttagttcagagacgaagtatgttctcggattccaaccagcgagtgaacgtacgctcttcaaaccaattgtatatggatttgaaagctttttgaaaggtagtacactaatttttacagctgtagtaggtatgttggctagtatatttacgggcggattctcatttgatatgttaaatggtccggttggtatttatcataacgtagactcagttgttaaagcgggtatcattagcttaattggatacactgcgttattaagtgtaaacttaggtattatgaatttaattcctattcctgcactagacggtggtcgtattttatttgttatatatgaagcgattttcagaaaaccagttaataaaaaagcggaaacaacgattattgctattggtgccattttcatggtcgttattatgatattagtaacgtggaatgatattcgacgatatttcttataatttaggaggataaataattatgaagcaatccaaagtttttataccaacgatgcgtgacgtgccatcagaagcagaagcacaaagtcatcgtttattattgaaagcgggtttgataaagcaaagtacaagtgggatttatagttatttaccgctagcaacacgtgtgttaaataatattactgcaattgtgcgacaagaaatggaacgtatcgattctgttgaaattttaatgccagcgttacaacaagctgaattatgggaagaatcaggacgttggggtgcatatggcccagaattaatgcgtttacaagatagacatggaagacaatttgcattaggtccaacacatgaagaattagttacatcaatagtaagaaatgaattgaaatcatacaaacaattaccgatgacattattccaaattcaatctaaattccgtgatgaaaagagaccacgttttggtttacttcgtggtcgtgaatttattatgaaagatgcatattcattccatgctgacgaggcatcattagatcaaacgtatcaagatatgtatcaagcgtatagccgtatttttgagagagttggcattaacgcaagaccagtagttgcagattcaggtgctattggcggtagccatacacatgaatttatggcattaagtgctatcggtgaggatacaatcgtttacagtaaagaaagtgattatgctgctaacatcgaaaaagcagaagtcgtttacgaaccaaatcataagcatactactgtgcaacctttagaaaaaattgaaacaccaaatgtaaagactgcgcaagaattggcagacttcttaggtagaccagtagatgaaatcgttaaaacgatgattttcaaagttgatggcgaatatattatggttttagtgcgtggacatcatgaaattaatgacattaaattaaaatcttatttcggcacagataatattgaactcgcaacacaagacgaaattgttaatttagttggtgcaaatcctggttcactaggtcctgtaattgataaagaaatcaaaatttatgcagataattttgtgcaagatttaaataatttagttgtcggtgctaacgaagatggttatcacttaattaatgtaagtgtaggtagagacttcaacgttgatgaatatggcgatttccgttttattttagaaggcgaaaagttaagtgatggttcaggcgttgcacattttgctgaaggtattgaagttggtcaagtattcaaattgggtactaagtattcagaatcaatgaatgctacattcttagataaccaaggaaaagcccaacctttaattatgggttgttacggtattggaatttctagaacgctaagtgcgattgttgaacaaaatcacgatgataatggaattgtttggcctaaatcagttactccatttgatttacatttaatttctattaatcctaagaaagatgatcaacgagaactagcggaggcactatatgctgaatttaatactaaatttgatgtgttgtatgatgatcgtcaagaacgtgcgggtgtcaaatttaatgatgctgatttaattggtttaccactgcgaattgttgttggtaaacgtgcatcggaaggtattgtagaagttaaagaacgtttaacaggtgatagcgaagaagttcacattgatgacttaatgactgtcattacaaataaatatgataacttaaaataattaagatcgaatgaattataagagtaggaaaaagctgaaagaaatcagatgcttatgtcctgctcttattatttttgatataatgattattcgatgaaaaatgactgaagacatagtataattaaagataaatttgttttaacaatattatgattagccaaatataaagcatttaattttctatcattactatgcctacataatctaaatattgttcgaacacgtaaaagtaatttctatttaaggtggtaattgtcttggcaatgacagagcaacaaaaatttaaagtgcttgctgatcaaattaaaatttcaaatcaattagatgctgaaattttaaatacaggtgaactgacacgtatagatgtttctaacaaaaacagaacatgggaatttcatattacattaccacaattcttagctcatgaagattatttattatttttaaatgcaatagagcaagagtttaaagatatcgccaacgttacatgtcgttttacggtaacaaatggcacgaatcaagatgaacatgcaattaaatactttgggcactgtattgaccaaacagctttatctccaaaagttaaaggtcaattgaaacagaaaaagcttattatgtctggaaaagtattaaaagtaatggtatcaaatgacattgaacgtaatcattttgataaggcatgcaatggaagtcttatcaaagcgtttagaaattgtggttttgatatcgataaaatcatattcgaaacaaatgataatgatcaagaacaaaacttagcttctttagaagcacatattcaagaagaagacgaacaaagtgcacgattggcaacagagaaacttgaaaaaatgaaagctgaaaaagcgaaacaacaagataacaacgaaagtgctgtcgataagtgtcaaattggtaagccgattcaaattgaaaatattaaaccaattgaatctattattgaggaagagtataaagttgcaatagagggcgtcatttttgatataaacttaaaagaacttaaaagtggtcgtcatatcgtagaaattaaagtgactgactatacggactctttagttttaaaaatgtttactcgtaaaaacaaagatgatttagaacattttaaagcgctaagtgttggtaaatgggttagggctcaaggtcgtattgaagaagatacatttattagagatttagttatgatgatgtctgatattgaagagattaaaaaagcgacaaaaaaagataaggctgaagaaaagcgtgtagaattccacttgcatactgcaatgagtcaaatggatggtataccaaatattggtgcgtatgttaaacaggcagcagactggggacatccagccattgcggttacagaccataatgttgtgcaagcatttccagatgctcacgcagcagcggaaaaacatggtattaaaatgatatatggtatggaaggtatgttagttgatgatggtgttccgattgcatacaaaccacaagatgtcgtattaaaagatgctacttatgttgtattcgacgtcgagacaactggtttatcaaatcagtatgataaaatcattgagcttgcagctgtgaaagttcataacggcgaaatcatcgataagtttgaaaggtttagtaatccgcatgaacgattatcggaaacgattatcaatttgacgcatattactgatgatatgttagtagatgcccctgagattgaagaagtacttacagaatttaaagaatgggttggcgatgcgatattcgtagcacataatgcttcatttgatatgggcttcatcgacacgggatatgaacgtcttggatttggaccatctacgaatggtgttatcgatacattagaattatctcgtacgattaatactgaatatggtaaacatggtttaaatttcttagctaaaaaatatggcgtagaattaacgcaacatcaccgtgccatttatgatacagaagcaacagcttacattttcataaaaatggttcaacaaatgaaagaattaggcgtattaaatcataacgaaattaacaaaaaactcagtaatgaagatgcatataaacgtgcaagacctagtcatgtcacattaattgtacaaaaccaacaaggtcttaaaaatctatttaaaattgtaagtgcatcattggtgaagtatttctaccgtacacctcgaattccacgttcattgttagatgaatatcgtgagggattattggtaggtacagcgtgtgatgaaggtgaattatttacggcagttatgcagaaggaccagagccaagttgaaaaaattgccaaatattatgattttattgaaattcaaccaccggcactttatcaagatttaattgatagagagcttattagagatactgaaacattacatgaaatttatcaacgtttaatacatgcaggtgacacagcgggtattcctgttattgcgacaggaaatgcacactatttgtttgaacatgatggtatcgcacgtaaaattttaatagcatcacaacctggcaatccacttaatcgctcaactttaccggaagcgcattttagaactacagatgaaatgttaaacgagtttcattttttaggtgaagaaaaagcgcatgaaattgttgtgaaaaatacaaacgaattagcagatcgaattgaacgtgttgttcctattaaagatgaattatacacaccgcgtatggaaggtgctaacgaagaaattagagaactaagttatgcaaatgcgcgtaaattgtatggtgaagacctgcctcaaatcgtaattgatcgattagaaaaagaattaaaaagtattatcggtaatggatttgcggtaatttacttaatttcgcaacgtttagttaaaaaatcattagatgatggatacttagttggttcccgtggttcagtaggttctagttttgtagcgacaatgactgagattactgaagtaaacccgttaccgccacactatatttgtccgaactgtaaaacgagtgaatttttcaatgatggttcagtaggatcaggattcgatttacctgataagacgtgtgaaacttgtggagcgccacttattaaagaaggacaagatattccgtttgaaacatttttaggatttaagggagataaagttcctgatatcgacttaaactttagtggtgaatatcaaccgaatgcccataactacacaaaagtattatttggtgaggataaagtattccgtgcaggtacaattggtactgttgctgaaaagactgcttttggttatgttaaaggttatttgaatgatcaaggcatccacaaaagaggcgctgaaatagatcgacttgttaaaggatgtacaggtgttaaacgtacaactggacagcatccagggggtattattgtagtacctgattacatggatatttatgattttacgccgatacaatatcctgccgatgatcaaaattcagcatggatgacgacacattttgatttccattctattcatgataatgtattaaaacttgatatacttggacacgatgatccaacaatgattcgtatgcttcaagatttatcagggattgatccaaaaacaatacctgtagatgataaagaagttatgcagatttttagtacacctgaaagtttgggtgttactgaagatgaaattttatgtaaaacaggtacgtttggggtaccagaattcggtacaggattcgtgcgtcaaatgttagaagatacaaagccaacaacattttctgaattagttcaaatctcaggattatctcatgggacagatgtgtggttaggtaatgctcaagaattaattaaaaccggtatatgtgatttatcaagtgtaattggttgtcgtgatgatatcatggtttatttaatgtatgctggtttagaaccatcaatggcttttaaaataatggagtcagtacgtaaaggtaaaggtttaactgaagaaatgattgaaacgatgaaagaaaatgaagtgccggattggtatttagattcatgtcttaaaattaagtacatgttccctaaagcccatgcagcagcatacgttttaatggcagtacgtatcgcatatttcaaagtacatcatccactttattactatgcatcttactttacaattcgtgcgtcagattttgatttaatcacgatgattaaagataaaacaagcattcgaaatactgtaaaagacatgtattctcgctatatggatctaggtaaaaaagaaaaagacgtattaacagtcttggaaattatgaatgaaatggcgcatcgaggttatcgaatgcaaccgattagtttagaaaagagtcaggcgttcgaatttatcattgaaggcgatacacttattccgccgttcatatcagtgcctgggcttggcgaaaacgttgcgaaacgaattgttgaagctcgtgacgatggcccatttttatcaaaagaagatttaaacaaaaaagctggattatctcagaaaattattgagtatttagatgagttaggctcattaccgaatttaccagataaagctcaactttcgatattcgatatgtaaaatgaaataatcaaggtatttatttaatgcgtatggcgtagttaaagaaatacaaaattgttgccggacataaaattatgcctgtatttcttttcaacgtcttacgagtctattcgaatgtaatagtgaagtaaatgaacaaacttttgcaagaatctctgattaatagtgaagtcatttgtttcaagcataaacttatgctataattaagttgcttaaaaattagtgaactcaggcagaagagtgggagattcccgctcttttctatttgccaaaaagggaggcctgtatgagtaaaattacagaacaagtagaagtgattgttaaaccaattatggaagacttgaattttgaacttgtagacgttgaatatgtcaaagagggtagagatcattttcttagaatctctattgataaagaaggtggcgtagatttaaatgattgtacgctagcttctgaaaaaataagtgaagctatggatgcaaatgatcctattcctgaaatgtattatttagatgtagcgtcacctggtgcagaacgtccaattaaaaaagaacaagatttccaaaatgcaataactaaacctgtatttgtttctttatatgtaccaattgaaggtgaaaaggaatggttaggcattttacaagaagtcaataatgaaacaattgtagtacaagttaaaatcaaagcaagaacgaaagatatagagataccgagagacaaaatagcaaaagcacgtcacgcagttatgatttaacgtgatgaggaggaaaaaacgtgtcaagtaatgaattattattagctactgagtatttagaaaaagaaaagaagattcctagagcagtattaattgatgctattgaagcagctttaattactgcatacaaaaagaattatgatagtgcaagaaatgtccgtgtggaattaaatatggatcaaggtactttcaaagttatcgctcgtaaagatgttgttgaagaagtatttgacgacagagatgaagtggatttaagtacagcgcttgttaaaaaccctgcatatgaaattggtgatatatacgaagaagatgtaacacctaaagattttggtcgtgtaggtgctcaagcagcgaaacaagcagtaatgcaacgtcttcgtgatgctgaacgtgaaattttatttgaagaatttatagacaaagaagaagatatacttactggaattattgaccgtgttgaccatcgttatgtatatgtgaatttaggtcgtatcgaagctgttttatctgaagcagaaagaagtcctaacgaaaaatatattcctaacgaacgtatcaaagtatatgttaacaaagtggaacaaacgacaaaaggtcctcaaatctatgtttctcgtagccatccaggtttattaaaacgtttatttgaacaagaagttccagaaatttacgatggtactgtaattgttaaatcagtagcacgtgaagctggtgatcgctctaaaattagtgtcttctctgaaaacaatgatatagatgctgttggtgcatgtgttggtgccaaaggcgcgcgtgttgaagctgttgttgaagagctaggtggcgaaaaaatcgacatcgttcaatggaatgaagatccaaaagtatttgtaaaaaatgctttaagcccttctcaagttttagaagttattgttgatgaaacaaatcaatctacagtagttgttgttcctgattatcaattgtcattagcgattggtaaaagaggacaaaacgcacgtctagctgctaaattaaccggctggaaaattgatattaaatcagaaacagatgcgcgtgaagcgggtatctatccagtagttgaagctgaaaaagtaactgaagaagatgttgctttagaagatgctgacacaacagaatcaaccgaagaggtaactgatgtttcagttgaaacaaatgtagagaaagaatctgaataataggttggagtgaagtatctatgaaaaagaaaaaaattccgatgcgaaaatgtattctttcaaatgaaatgcatcccaaaaaagatatgattcgtgttgttgttaataaagaaggcgaaatctttgcggatgttactggaaagaaacaaggccgtggcgcatatgtttctaaagatgttgctatggttgaaaaagcacaacaaaaagaaattttagaaaaatattttaaagcatctaaagagcaattggatcctgtttacaaagaaattattaggttaatttatagagaagagatcccaaaatgagtatagatcaaatattaaactttttaggattagcaatgagagctggtaaagtaaaaacaggtgaatcagtcattgttaatgaaattaaaaaaggaaatttgaagctcgttattgttgcaaatgatgcgtctaataatacagctaaattaattacagataaatgtaagagttacaaagttccattcagaaagtttggaaatcgaaatgaattgggaatagcacttggaaaaggtgagcgtgttaatgtagggattactgacccaggctttgctaaaaagttgctatcaatgatagatgaatatcataaggagtgattatatgagtaaacaaagaatttacgaatatgcgaaagaattaaatctaaagagtaaagagattatagatgagttaaaaagcatgaatattgaggtttcaaatcatatgcaagctttggaagatgaccaaattaaagcattagataaaaagttcaaaaaagaacaaaagaacgacaataaacaaagcactcaaaataatcaccaaaaatcaaacaatcaaaaccaaaataaagggcaacaaaaagataacaaaaagaatcaacaacaaaataataaaggcaacaaaggcaataaaaagaataatagaaataataagaaaaataacaagaataataaaccacaaagtcaaccagctgctccaaaagaaataccatcaaaagtgacatatcaagaaggtattacagtaggcgaatttgcggataaattaaatgttgaatcatcagaaattatcaaaaaattattcttacttggtattgttgctaatatcaatcaatcattaaatcaagaaacaattgaattaattgccgatgattatggcgttgaggttgaagaagaagttgtgattaatgaagaagatttatcaatctacttcgaagacgaaaaagatgatccagaagcaattgagagaccagctgttgtaacaattatgggacatgttgaccatggtaaaactactttattagattcaattcgtcatacaaaagttacagcaggtgaagcaggcggaatcactcaacatattggtgcatatcaaattgaaaacgatggcaaaaaaatcactttcttagatacaccgggacatgctgcttttacaacgatgcgtgcgcgtggtgcacaagtaacagatattacgattttagtagtagcagctgacgatggtgttatgccacaaacaattgaagcaattaaccatgctaaagaagcagaagtaccaattattgttgcagtaaataaaattgataaaccaacttcaaatcctgatcgagttatgcaagaattaactgaatatggtttaattcctgaagattggggcggcgaaacaattttcgttccactttctgcattaagtggtgatggtatcgacgatttattagaaatgataggattagttgcagaagttcaagaacttaaagcaaatcctaaaaaccgtgctgttggtacagttatcgaagctgaattagataaatcacgtggtccttctgcttcattattagtacaaaacggtacattaaatgttggtgatgcgattgtagttggtaatacttacggccgtatccgtgcaatggttaacgacttaggtcaaagaatcaaaacagctggtccatcaacgcctgttgaaattacaggtattaatgatgtgccacaagctggggatcgctttgttgtatttagtgatgaaaaacaagctcgtcgtattggtgaatcaagacacgaagcaagcattgtacaacaacgtcaagaaagtaaaaatgtttcattagataacctgtttgaacaaatgaaacaaggtgaaatgaaagatttaaacgttattattaaaggtgatgttcaaggttctgttgaagctttagctgcatcattaatgaaaattgatgttgaaggcgtaaatgttcgtatcattcatacagcggttggtgcgattaacgagtcagacgtaacacttgctaatgcctcaaacggtattatcattggtttcaatgttcgtccagacagtggtgcaaaacgtgctgcagaagctgaaaatgttgatatgcgtttacacagagttatttataatgttatcgaagaaattgaatcagcgatgaaaggtttacttgatccagaatttgaagaacaagttatcggacaagctgaagttcgtcaaacattcaaagtttctaaagttggtactattgctggatgttatgttactgaaggtaaaattacgcgaaatgctggtgtacgtattattcgtgatggtattgttcaatatgaaggcgaattagatacacttaaacgtttcaaagatgatgctaaggaagttgcaaaaggttatgaatgtggtattacaattgaaaactacaatgaccttaaagaaggcgatgttatcgaagcatttgaaatggttgaaattaagcgttaattaaataaattacaagctaaaagtatagttaagattgatatgctccctataaatattgcactttttaagtgtctactttatagggagcatatttgatactagcttttggatttttattagaataaattaactattaaaagttacgttatatagacatgatttttgtataaaattttgtggtgacctagaatgctttttaatgacaaaatataatgtcgactattattggaaaattttctgttgaaatgcctatcttacggcaaactttatttgattttataggtttaatttattaaaataacgtgtgagctaaaataattgtttaagcattgttacactaaaaaatgcaaataacaattgaacttaaagataaagaggtgacaagaatgagcagtatgagagcagagcgtgttggtgaacaaatgaagaaggaattaatggatatcatcaacaataaagtcaaagatcctcgagttggttttattacaattacagatgttgttttaacaaatgatttatcgcaggctaaagtatttttaactgtattaggtaacgataaagaagtagaaaatacatttaaagcacttgataaagcaaaaggcttcattaagtctgaattaggttctagaatgcgattacgtattatgccggaattaatgtatgaatatgatcaatcaatcgaatatggtaataaaattgaacgaatgattcaagatttacacaaacaagatagataatttagtgttagatatctggaaaatgtttgataatttcttaatatcggtatattaacattaaacagttaatacatagatgtgtagaaatagttaacattttccagtttttttatggataaattcagttaatacgctattaaaatatatttttaaaaaagaaggtgacaacatgtataacggtatattaccagtatataaagaacgtggtttaacaagtcatgacgtcgtattcaaattgcgtaaaattttaaagactaaaaaaatagggcacacaggtacgcttgatcctgaagttgcaggcgtgttaccggtatgtataggtaatgcaacgagagttagtgattatgttatggatatgggcaaagcttatgaagcaactgtatcgataggaagaagcacaacgactgaagatcaaacgggtgatacattggaaacaaaaggtgtacactcagcagattttaataaggacgatattgaccgattgttagaaagttttaaaggtatcattgaacaaattccgccgatgtactcatccgtcaaagtaaatggtaaaaaattatatgaatatgcgcgtaataatgaaacagttgaaagaccaaagcgtaaagtttatattaaagacattgggcgtatatctgaattagattttaaagaaaatgagtgtcattttaaaatacgcgtcatctgtggtaaaggtacatatattagaacgctagcaactgatattggtgtgaaattaggctttcccgcacatatgtcgaaattaacacgaatcgagtctggtggatttgtgttgaaagatagccttacattagaacaaataaaagaacttcatgagcaggattcattgcaaaataaattgtttcctttagaatatggattaaagggtttgccaagcattaaaattaaagattcgcacataaaaaaacgtattttaaatgggcagaaatttaataaaaatgaatttgataacaaaattaaagaccaaattgtatttattgatgatgattcagaaaaagtattagcaatttatatggtacaccctacaaaagaatcagaaattaaacctaaaaaagtctttaattaaaggagatagaatttatgaaagtcatagaagtgacacatcctatacaatctaaacagtatattacagaggatgttgcaatggcattcggatttttcgatggcatgcataaaggtcatgacaaagtctttgatatattaaacgaaatagctgaggcacgcagtttaaaaaaagcggtgatgacatttgatccgcatccgtctgtcgtgttgaatcctaaaagaaaacgaacaacgtatttaacgccactttcagataaaatcgaaaaaattagccaacatgatattgattattgtatagtggttaatttttcatctaggtttgctaatgtgagcgtagaagattttgttgaaaattatataattaaaaataatgtaaaagaagtcattgctggttttgattttacttttggtaaatttggaaaaggtaatatgactgttcttcaagaatatgatgcgtttaatacgacaattgtgagtaaacaagaaattgaaaatgaaaaaatttctacaacttctattcgtcaagatttaatcaatggtgagttgcaaaaagcgaatgatgctttaggctatatatattctattaaaggcactgtagtgcaaggtgaaaaaaggggaagaactattggcttcccaacagctaacattcaacctagtgatgattatttgttgcctcgtaaaggtgtttatgccgttagtattgaaatcggcactgaaaataaattatatcgaggggtagctaacataggtgtaaagccaacatttcatgatcctaacaaagcagaagttgtcatcgaagtgaatatctttgactttgaggataatatttatggtgaacgagtgaccgtgaattggcatcatttcttacgtcctgagattaaatttgatggtatcgacccattagttaaacaaatgaacgatgataaatcgcgtgctaaatatttattagcagttgattttggtgatgaagtagcttataatatctagagttgcgtatagttatataaacaatctataccacacctttttcttagtaggtcgaatctccaacgcctaactcagattaaggagtattcaaacattttaaggaggaaattgattatggcaatttcacaagaacgtaaaaacgaaatcattaaagaataccgtgtacacgaaactgatactggttcaccagaagtacaaatcgctgtacttactgcagaaatcaacgcagtaaacgaacacttacgtacacacaaaaaagaccaccattcacgtcgtggattattaaaaatggtaggtcgtcgtagacatttattaaactacttacgtagtaaagatattcaacgttaccgtgaattaattaaatcacttggtatccgtcgttaatcttaatataacgtctttgaggttggggcatatttatgttccaaccttaatttatattaaaaaagctttttacaaatattaacatttattatatgttaagctaatattgagtgaataataaggttacaatgagataaagatgatataagtacacctagagtaataatcaagatattaaaaataaagtatgttttttaaaaaatataacttatatttatactgataagggtgggacgataagtctattttgtaaataatagatggatatcccgctctctttttttccaattcaatattttataactaatattaaaatacgataataaatgatatgatataactattagattcaagagaggagatttataatgtctcaagaaaagaaagtttttaaaactgaatgggcaggaagatctttaacgattgaaacagggcaattagctaaacaagcaaatggcgctgtattggttcgttatggagatacagtcgtgttatcgacggcaactgcatcaaaagaacctcgtgatggagatttcttcccattaacagtgaactatgaagaaaaaatgtacgctgcgggtaaaattcctggtggatttaaaaagagagaaggacgtcctggtgacgatgcaacattaactgcgcgattaattgatagaccaattagacctttattccctaaaggatataagcatgatgttcaaattatgaacatggtattaagtgcagatcctgattgttcaccacaaatggctgcaatgattggttcatctatggcgcttagtgtgtcggatattccattccaagggccaatcgccggtgtaaatgtgggttatattgatggtaaatatatcattaacccaacagtagaagaaaaagaagtttctcgtttagaccttgaagtagcaggtcataaagatgcagtaaacatggtagaggcaggcgctagtgagattactgaacaagaaatgttagaggcgattttctttggtcatgaagagattcaacgtttagttgatttccaacaacaaatcgtcgaccacattcaacctgttaaacaagaatttattccagcagagcgtgatgaagcgctagttgaacgtgtaaaatcattaaccgaagaaaagggacttaaagaaacagttttaacatttgataaacaacaacgagatgaaaatcttgataatttaaaagaagaaatcgtcaatgaatttatcgatgaagaagatccagagaatgaattacttattaaagaagtttatgcaattttaaatgaattagtgaaagaagaagttcgacgtttaattgcagatgaaaaaatcagaccagacggccgtaaacctgatgaaatccgtccattagattctgaagttggtattttacctagaacgcatggttcaggtctatttacacgcggtcagactcaagcactttcagttttaacgttaggtgctttaggcgattatcaattaattgatggtttaggacctgaagaagaaaaaagattcatgcatcattataacttcccgaatttttcagtaggtgaaactggtccagtacgtgcgccaggtcgtcgtgaaattggacatggtgcgttaggtgaaagagcattaaaatatattattcctgatactgctgatttcccatatacaattcgtattgtaagtgaggtacttgaatcaaacggttcatcatctcaagcgtcaatttgtggatcaacattagcattaatggatgcgggcgtaccgattaaagcaccagttgctggtattgctatgggccttgttacacgtgaagatagctatacgattttaactgatatccaaggtatggaagatgcattaggtgatatggactttaaagtcgctggtactaaagaaggtattacagcaatccaaatggatattaaaattgacggtttaacacgtgaaattatcgaagaggctctagaacaagcgagacgtggtcgtttagaaataatgaatcatatgttacaaacaattgatcaaccacgtactgaattaagtgcttacgcgccaaaagttgtaactatgacaattaaaccagataagattagagatgttatcggacctggtggtaaaaaaattaacgaaattattgatgaaacaggcgttaaattagatattgaacaagatggtactatctttattggggccgttgatcaagctatgataaatcgtgctcgtgaaatcattgaggaaattacacgtgaagcggaagtaggtcaaacttatcaagccactgttaaacgtattgaaaaatacggtgcgtttgtaggcctattcccaggtaaagatgcgttgcttcacatttcacaaatttcaaaaaatagaattgaaaaagtggaagatgttttaaaaatcggtgacacaattgaagttaagattactgaaattgataaacaaggtcgagtaaatgcatcacacagagcattagaagaataatatttaaagtcatatgacgacaatgtatcgtcatgtgatttttttatgccattttttacgaagtgatccattttgaatttgttgtattgaacattttaaaacgctttattattttgtgtgcaactgttaattatcctgtatgtatagtgattaatagtgtacatcaagtcttttttaacttataatgaatagtgagtttatatatggacgggtaacaaatttaggaggtaagattttgagtttaataaagaaaaagaataaagatattcgcattataccattaggcggtgttggcgaaattgctaaaaatatgtatatcgttgaagtagacgatgaaatgtttatgttagatgctggacttatgtttccagaagacgaaatgctaggtattgatattgttataccagatatttcatacgtacttgaaaataaagataaattgaagggtatattccttacacacggacatgagcacgcgattggtgcagtgagttatgttttagaacaattagatgcaccagtatatggatctaaattgacaatagcgttaattaaagaaaatatgaaagcccgtaatattgataaaaaagttcgctactacacagttaataatgattcaattatgagattcaaaaacgtgaatattagtttctttaatacgacacacagtattcctgatagtttaggtgtttgtattcacacgtcatatggtgccattgtgtatacaggtgaatttaagtttgaccaaagtttacatggacattatgcaccagatattaaacgtatggcagagattggtgaagaaggcgtatttgtcttaatcagtgattcgactgaggcagagaaacctggatataatactccggaaaatgtgattgaacatcatatgtatgatgcttttgcaaaagtgcgaggtcgcttgattgtttcatgttatgcttcgaactttatacgtattcagcaagttttaaatattgctagcaagctaaatcgtaaagtgtcatttttaggaagatcacttgaaagttcatttaatattgctcgtaaaatggggtatttcgacattcctaaagatttgctaattcctataacagaagttgataattatcctaaaaatgaagtgataattatagctactggtatgcaaggagaacctgtagaagccttaagtcaaatggcgcaacataagcataaaattatgaatatcgaagaaggcgattctgtatttttagcaattacggcttctgctaatatggaagttatcattgcgaatacattaaatgagcttgtacgtgctggcgcacatattattccaaataacaagaagattcatgcttcaagtcatggttgcatggaagaattaaaaatgatgattaatattatgaaacctgaatactttattcctgtacaaggtgaatttaaaatgcagatagcacatgcgaagctagcatctgaagcaggtgttgcaccagaaaagattttccttgtggaaaaaggagatgtcattaattacaacggtaaagatatgatattaaatgaaaaggtaaattcaggaaatattttaatagatggtattggtattggggatgtaggaaatatcgtattgagagaccgtcatcttttagcagaagatggtatctttattgctgtagtaacgttagatcctaaaaatagacgtatagctgcaggacctgaaattcaatctcgtggatttgtatatgtacgtgaaagtgaagacttattacgtgaagcagaagagaaagtacgtgaaatagtagaagctggtttacaagaaaaacgcatagaatggtctgaaattaagcaaaatatgcgtgatcaaattagtaaactattattcgaaagtacaaaacgtcgtcctatgattattccagtaatttctgaaatttaatcaaaaagtcattaacataaaagaggtcagaacaagtcaccgaaatataatggttgtcatggacaatttacttatattttatgatggtcaattgaaaggggtaacgattaatctgttatcttaagtaaattgatacatagatgatattgttctaacctctttcatcgtctgtttggactacatattctaaaaatcaaataggaaattatataataacgtcgttttaactaaggtaacataaggaggtgcgtcaattggcacaagcaaaaaagaaatcgacagctaagaaaaaaacaacatcaaaaaaaagaacaaattcgaggaaaaagaagaatgataatccgatacgttatgtcatagctattttagtagttgtattaatggtgttgggtgttttccaattaggaataataggtcgtctaattgacagcttctttaattatttatttgggtacagtagatatttaacatatattttagtactcttagcaactggttttattacatactctaaacgtattcctaaaactagacgaacggctggttcgattgtattgcaaattgcattgctatttgtatcacagttagcttttcattttaatagtggtatcaaagctgaaagagaacctgtactttcttatgtgtatcagtcataccaacacagtcattttccaaattttggtggcggtgtattaggcttttatttattagagttaagcgtacctttaatttcattatttggtgtatgtattattactattttattattatgctcaagtgttattttattaacaaaccatcaacatcgtgatgttgcaaaagttgcactggaaaatataaaagcttggtttggttcatttaatgaaaaaatgtcggaaagaaaccaagaaaaacaattgaagcgtgaagaaaaagcgagacttaaagaagaacaaaaggcacgtcaaaatgaacagccacaaataaaagatgtgagtgattttacggaagtgcctcaagaaagagatattccaatttatgggcatactgaaaatgaaagtaaaagccagagtcaaccaagtcgaaaaaaacgtgtgtttgatgcagagaatagttcgaataacatcgtaaatcatcatcaagcagatcagcaagaacaattaacagaacaaactcataacagtgttgaaagtgaaaacactattgaagaagctggtgaagttacgaatgtgtcgtatgttgttccaccgttaactttacttaatcaacctgcaaaacaaaaagcaacatctaaagctgaagtgcaacgtaaaggacaagtactagagaatacattaaaagattttggggtaagtgcaaaagtgacacaaattaaaattggtcctgcagtaactcaatatgaaattcaaccagctcaaggggttaaagtgagtaaaattgtaaacttgcataatgatattgcattagctttagcagcaaaagatgttagaattgaagcgccaatacctggtcgctctgcagtaggtattgaagtgccaaatgagaaaatttcattagtttcactaaaagaagttttagatgaaaaattcccgtctaataataaactagaagttggattaggacgagatatatcaggtgatccaattactgttccactaaatgaaatgccacacttattggtggcaggatcgacgggtagtggtaaatctgtttgtataaatggtattattacaagtattttattaaatgctaagccgcatgaagttaaacttatgttaatcgatccgaaaatggttgaactaaatgtttataacggaattccacatttattaattccggttgttacaaatcctcataaagctgctcaagctttagaaaaaattgtagctgagatggaaagacgttatgatttattccaacattcatcaactagaaatattaaaggttataacgaattaatccgtaagcaaaatcaagaattagatgagaaacaaccagaattaccttatatcgttgttattgtagatgagcttgcagatttaatgatggtagctggtaaagaagttgaaaatgcgattcaacgtattacacaaatggcacgtgcagcaggtatacatttgattgtagcaacacaaagaccttctgtggatgtaattacgggtatcattaaaaataatattccatctagaattgcttttgctgtgagttctcaaacagattcaagaactattattggtactggcggcgcagaaaagttacttggtaaaggtgacatgttatacgttggaaatggtgattcatcacaaacacgtattcaaggggcgtttttaagtgaccaagaggtgcaagatgttgtaaattatgtagtagaacaacaacaggcaaattatgtaaaagaaatggaaccagatgcaccagtggataaatcggaaatgaaaagtgaagatgctttatatgatgaagcgtatttgtttgttgttgaacaacaaaaggcaagtacatcattgttacaacgccaatttagaattggttataatagagcatctaggttgatggatgatttagaacgcaatcaggtaatcggtccacaaaaaggaagcaagcctagacaagttttaatagatcttaataatgacgaggtgtaaaaaaatgtcagaaatgaatgcggtatataacgttaaacaatacattttaaatttgattaagcaaaataaattggaatatggtgaccaacttccaagtaatttatcaattgccagagaattaaatgtaaaaaccgacgatgtttatgaagcaattcaggcattgattactgaacaagtcattaaagataattttgaagagggcacaagtgttaagtcactgccccctttcttttatccattgaatgaacttataagtattgggcaaatgattaaaaatgcaggatttgaatgcggaactgaatacttaaattttgatgagcaaccagcaactatgttagatgcaaatttgttgagcgttgaagaaggatatccagtaaccattatagaacgattacgaactgccgatggagaaccggtcgtctattgtttagataaaattgctaaaaaagaattaacatgtacagagtatcaaatgagcaatggatcgatactaagtgcgataaaagaacaaagtaatcataatatttgttatgctgatacagaaattgaagcggtaaattatgaacctcgaatatccgaagtacttaatgcttcgccacacgaaggtttgattttattaaaaattacgcactacaatgaattagatgaacctattttgtattcattaaattatatgaaaaatagcttagttcaatttaaaatcactagaaaaatatagatgaagatatagaggaggctatatatttgagtagacaatctcaaccaaatatacatatcaaagtttcaccaacaactaaatttaaaacaactactatagtttttaaatttatggcacctttagaatatgacacaataacagctagatcattattaagcaaattattagttcgagcaactaagaaatggccaaccgataagtcatttaataatcacttagccgatttatatggtgcgtatgtgaatagtacaatttcaaaattcaaagatcagcatgtcattacattttcattagaaattgttaatgaacgttatttaagaaacggtgaatcattatttaatcaaggattagatttattacaagaaatcatttggaatccattaattgaaaataaagcattcaatgataattttgttaaccaagagaaaacattattagccaaaaaaatagaagcaatggtagataacaaagcacaatattcgtttttaaaattactcgaccatatgtttgaaaatgaagcatacaaatacttatctacaggacaactagaacaaatcccacatattactgctgaaacactatatcatacatatcaatcaatgattaataatgatcaatgttctgtttatgttgtcggcaatgtagaacctgaaagtgttgagaaccaaatacgtgaaaaatttgcacttaaaccattcgataaacatcaattccaacattctactcatcatttacacgatgaagaagttgattatattgttgaatatgatgacgtggatcaagctaaattaaatatgggataccgttttccaacacaatatggacaaagtggatatgctgcctttgttgtatttaacatgatgtttggaggagatccttcatctgttttatttaatgaagtgcgagaaaagcaaagtttagcgtactctatacactcacaaattgatggcaaaaatggctatttatttgttttgagtggggtttcaagtgataagtacgaaactgcaaaagacactattataagtgaatttgaaaaaataaaagcaggagatttcactgaagaaaaattagagttagctaaaaaagtaatcatttctcatcgatatgaatctgaagatcgtccgaaaagtattatagagattatgcataaccaaatattattagagcaaccacaaagcaaagaaacatttataaatgatatacagaaggtaagtcgcgaagatattgtttctgttgctgaaaaagcatttttagatacaatctatgtgttgacaaaaggaggggataaataatgaaagagcgttattatgaattaatagacgaaagggtattcgaacaagaattagaaaatggtttacgattatttattatccccaaaccaggttttcaaaagacatttgtcacgtacactacgcaatttggttcattagataatcaattcaaaccccttggacaagaccaatttgttactgtacctgatggagttgctcactttttagaacataaattatttgaaaaagaagaagaagacttatttactgcgtttgctgaagataatgcacaagcaaatgcgtttacaagctttgatcgtacaagctacttgttcagtgcaactgataatattgaaaacaatattaaacgtttacttacaatggttgaaacgccttattttacaaaagaaactgttgataaagaaaaaggtattattgcagaagagataaaaatgtatcaagaacaacctggatataaattaatgttcaatacattgcgtgcaatgtatcaacaacatccaatacgtgttgatattgccggtagtgtagaaagcatatatgatattacaaaagatgatttgtatctatgttatgaaacgttttatcatccatcaaatatggttttatttgttgttggcgatgtggatcctgaagcaatatgtcgaatagtaaaacaacacgaggatgctcgtaataaagttaaccaacccaaaatcgaacgaggacttgttgatgaaccggaggatgttaaagaagcatttgttactgaatctatgaaaattcaatcaccaagactaatgcttggttttaaaaataaaccattacaagaagcgcctcaaaaatatgtacaacgtgatttagaaatgtctttattctttgagttaatttttggggaagaaacagatttttatcagaatttattaaacgaaggacttatcgatgatacatttggttatcaatttgtactagagccgacgtatagtttttcaatcgtgacaagcgctactgaagaaccagataaattaaaaaaattattattagatgagttgcgtgataaaaaaggcaatttccaagatgcagaagcatttgaacttttgaaaaagcaatttataggtgagttcatatcaagtttaaactcacctgaatatattgctaatcaatatactaaattgtattttgaaggtgttagtgtgtttgacatgttagacattgttgaaaacatcacgttagatagtattaacgaaacgtcatcgttatatttaaatttagatcagcaagtcgatagtcgtttggagattaaaaagtaatgaaagcattagtattaggtggttctggttcaattggttctgagatagtcaaacaattattaactgatggatttgaagtttatgtgcaatattatcgtactgatataaatgaattaactagcaaatttaatgatgacaaagtgcattttatacaagcggatttatctcaaacaattgatattgacaaaacatttggtgacattaaatcattagactgtttaatatatgcaagtggtcagtctttatatggtgttttacaagatatgaaagaccatgatattgatgcatgttatcagttaaatgtgttgcaattaattcgattatgtagatatttcgttgatgttttacgtcaaagtgacaatggaagaattattgtaatttcatcaatttggggtgagacaggagctagtatggaaactatttattcgacgatgaaaagtgcacaattaggtttcgttaaggcgcttagtcaagagcttgcactaacatcagtgacagtaaatgctatcgcacctggatttgtagctggtaatatggcaagtgagtggcaagaagatgaacttcaagcaatgataactgaattaccacaacagcgattggttttaccgagtgaggttgctcatacatgcgcctatttatatcacccaaatgctagaagtgttactggaactatacagaaagttaatggtgcttggtatatttaaaatatagaactatttttatgagcaaatgtttttatgattgatgttataatatgaatattacaatgaatcataatttgttaattaaacaaggggtgaggttcaccatgacagttgcagagaaaaaagaatggtacctagaatacgaaattgaaattaatagaccgggtcttttaggtgatgtatctagtttattaggtatgttaggtataagtattgttacaattaatggtgttgatcaaggtaaacgaggccttttaattaaaacagacaatcttgaaaaagttgaacgttttgagcaaatagctcgtggtataaatgaaattgaaataacaaagcttaaaaaaccagaattaagagaccgtcttgcagttagacatggtagatatattgagcaagatgcaaaagataagaaaacctttcgatttgagcgtgaagatttaggcttgttagtagactttttagctgaattgttcaaagaagaaggtcataagttgattggcattagaggtatgccacgggttggtaaaactgaatcaattgttgcgggaagtgtttgtgcacataagagatggttatttattagttctactttaataaaacaaactgtacgtagctctctaatcaaaggggaatatgatgccaatcatgtatatattattgatggtgcagttactgccagagaatctaatccaaaacatcaagagcttgttaacgaagttatgacgttaccatcaatcaaagtcgttgaacatcctgatttatttgttgaaacaagtacttgtacaatggaagattttgactatattatcgaattgagagaaaatgaaaatcaagaaatacattacgaagaaatgaagaaacagacagtccaaagtaagaataatttagattttggagatccatttggtggtggttttggtttcttcgagtaagtgtaaggaggctatgaattgaaaacggtcggtgaagcgctaaaaggtagacgtgaaaggttaggaatgactttaacagaattagagcaacgtactggaattaaacgtgaaatgctagtgtatattgaaaataatgaattcgatcaactaccgaataaaaattacagtgaaggatttattagaaaatatgcaagcgtagtaaatattgaacctaaccaattaattcaagctcatcaagatgaaattccatcgaaccaagccgaatgggacgaagtaattacagttttcaataataataaagacttagattataagagtaaatcaaaagagccaatacaattattagtaatcatgggcattacagttttaataactttattgttatggatcatgttagttttaatattttaacagaaataaattagtgagaaatgaggatgtataatgaatattccgaaccagattacggtttttagagtagtgttaataccagtttttatattgtttgcgttagttgattttggatttggcaatgtgtcatttctaggaggatatgaaataagaattgagttattaatcagtggttttatttttatattggcttcccttagcgattttgttgatggttatttagctagaaaatggaatttagttacaaatatggggaaatttttggatccattagcggataaattattagttgcaagtgctttaattgtacttgtacaactaggactaacaaattctgtagtagcaatcattattattgccagagaatttgccgtaactggtttacgtttattacaaattgaacaaggattcgtaagtgcagctggtcaattaggtaaaattaaaacagcagttactatggtagcaattacttggttgttattaggcgatccattggcaacattgattggtttgtcaataggacaaattttattatacattggtgttatttttactatcttatctggtattgaatacttttataaaggtagagatgtttttaaacaaaaataaatatttgtttatactagatttcagtttcatatggaatctagtttttttaatcccaattttagaaattagccacgcatttgtttataatgatatattgtaaaacaatatttgttcatttttttaggaaaatgtgttgtagcatctgatacattgaatttaaaattgatgtgaatttttaattggaatacatgaaaaaatgaattaaacgatacaagggggatataaatgtcaattgccattattgctgtaggctcagaactattgctaggtcaaatcgctaataccaacggacaatttctatctaaagtatttaatgaaattggacaaaatgtattagaacataaagttattggagataataaaaaacgtttagaatcaagtgtacgtcatgcgttagaaaaatatgatactgttattttaacaggtggcttaggtcctacgaaagatgacttaacgaagcatacagtggcccagattgttggtaaagatttagttattgatgagccttctttaaaatatattgaaagctattttgaggaacaaggacaagtaatgacacctaataataaacaacaggctttagtaattgaaggttcaactgtattagcaaatcatcatggcatggctccaggaatgatagtgaattttgaaaacaaacaaattattttattaccaggtccaccgaaagaaatgcaaccaatggtaaaaaatgaattgttgtcacattttataaaccataatcgaattatacattctgaactattaagatttgcgggaataggtgaatctaaagtagaaacagtattaatagatcttatcgataaacagactaatcctacgattgcgcctttggcaggaagtcatgaagtatatattagattgactgcaaatgccgactcaaaagaacaagcacaatcattgattcaacctgttaagcaagaaattctttatcgtattggagaatattattatggttcagatgacacattaattgagcaagctgtaataaagaaaattcatgaaccttttgtaatatatgatggtattactaatggtgctttatatcatcgattgaaagaagtggatttaaacgatgttctaaagggtatgattaatcacaatgaaaactttgttgatattaataaacctattgagcagcaattaaaagatgcagtgcaatttgttaataaattatttaatgtgtcatcagcaattattctattagagtatgatggtgtagtccatataggctatgataataacttagaatttaaaactgaacaatttaaaatgtctaaatctagaaatttattaaagaacagaagtcaaaattatgcgctcataagattattaaattggcttagaactacaaattaattgtattatcgataaaaatacaagcacgtttgttcgtttttgtgttttgatttcaagattttatacgaacaaatattcgcaaaacacttgtattttattttgaatccttgtatagtattggtaagataattaaaagatagcaatttcaattaggaggtctcgctttggataacgatcgtcaaaaagctttagatacagtaattaaaaatatggagaaatctttcggtaaaggtgccgtaatgaagttgggtgacaatataggtcgccgagtttcaactacatcaactggttcagttacattagataatgcgctaggtgtaggtggctatcctaaaggacgaattattgaaatttatggtcctgaaagttctggtaagacaacagtagcgcttcacgctattgctgaagtacaaagtaatggcggggtggcagcatttatcgatgctgaacatgctttagatccagaatatgctcaagcattaggcgtagatatcgataatttatatttatcgcaaccggatcatggtgaacaaggtcttgaaatcgctgaagcatttgttagaagtggttcagttgatattgtagttgtagactcagttgctgctttaacacctaaagctgaaattgaaggagaaatgggagacactcacgttggtttacaagctcgtttaatgtcacaagcgttacgtaaactttcaggtgctatttctaaatcaaatacaactgctattttcatcaaccaaattcgtgaaaaagttggtgttatgttcggtaatccagagactacaccaggtggacgtgcattaaaattctatagttcagtaagactagaagtacgtcgtgcagaacagcttaaacaaggacaagaaattgtaggtaatagaactaaaattaaagtcgttaaaaataaagtggcaccaccatttagagtagctgaagttgatattatgtatggacaaggtatttctaaagagggtgaacttattgatttaggtgttgaaaacgacatcgttgataaatcaggagcatggtattcatacaatggcgaacgaatgggtcaaggtaaggaaaatgttaaaatgtacttgaaagaaaatccacaaattaaagaagaaattgatcgtaaattgagagaaaaattaggtatatctgacggtgatgttgaagaaacggaagatgcaccaaagtcattatttgacgaagaatagtacacaaatttatatctatagttaaacttagcaagtatccttataggattgattgaaagtgatattcatctcataaagctagaataatatctaactttatgggatgcactacaaatcgagactataaggttttttattttatttactattacattatcaatagttttataatcgagcttcaaaactttagaaaatagtagaaatagcattcaataaagtgcaaaagtgcaaattgataacttgacacttatctcctataaaccgtacaattaatttgtatgatttatatataatttcataaagtcatattgaatttcatataaagagcaaaccctagaaaaggaggtgtttgtgtgaatttattaagcctcctactcattttgctggggatcattctaggagttgttggagggtatgttgttgcccgaaatttgttgcttcaaaagcaatcacaagctagacaaactgccgaagatattgtaaatcaagcacataaagaagctgacaatatcaaaaaagagaaattacttgaggcaaaagaagaaaaccaaatcctaagagaacaaactgaagcagaactacgagaaagacgtagcgaacttcaaagacaagaaacccgacttcttcaaaaagaagaaaacttagagcgtaaatctgatctattagataaaaaagatgagattttagagcaaaaagaatcaaaaattgaagaaaaacaacaacaagtagatgcaaaagagagtagtgttcaaacgttaataatgaagcatgaacaagaattagaacgcatctccggtctcactcaagaagaagctattaatgagcaacttcaaagagtagaggaagaactgtcacaagatattgcagtacttgttaaagaaaaagaaaaagaagctaaagaaaaagttgataaaacagcaaaagaattattagctacagcggtacaaagattagcagcagatcacacaagtgaatcaacggtatcagtagttaacttacctaatgatgagatgaaaggtcgaatcattggacgagaaggacgaaacatccgtacacttgaaactttaactggcattgatttaattattgatgacacaccagaagcagttatattatctggttttgatccaataagaagagaaattgctagaacagcacttgttaacttagtatctgatggacgtattcatccaggtagaattgaagatatggtcgaaaaagctagaaaagaagtagacgatattattagagaagcaggtgaacaagctacatttgaagtgaacgcacataatatgcatcctgacttagtaaaaattgtagggcgtttaaactatcgtacaagttacggtcaaaatgtacttaaacattcaattgaagttgcgcatcttgctagcatgttagctgctgagctaggcgaagatgagacattagcgaaacgagctggacttttacatgatgttggtaaagcaattgatcatgaagtagaaggtagtcatgttgaaatcggtgtagaattagcgaaaaaatatggtgaaaatgaaacggttattaatgccattcactctcatcatggtgatgttgaacctacatcaattatctctatccttgttgctgctgcagatgcattatctgcggctcgtccaggtgcaagaaaagaaacattagagaattatattcgtcgattagaacgtttagaaacgttatcagaaagttatgatggtgtagaaaaagcatttgcgattcaggcaggtagagaaatccgagtgattgtatctcctgaagaaattgatgatttaaaatcttatcgattggctagagatattaaaaatcagattgaagatgaattacaatatcctggtcatatcaaggtgacagttgttcgagagactagagcagtagaatatgcgaaataatttttgtctccctcacaaattagtgagggagcttttttaagttgtagtctcaatctagttagacagcactttattggcgataactatattaaacagtcgttatttgaaattaagacggaccttatattaaataagaagttattgctttaaataaaaatgttttagtcttcataattactatatttatattatgtaaacctataaaggtgattgctttttctaactaacaaaaaagaagagaagatgtaacacatcttctcttctgcaatattaattaggatttatttctaagttgagttattttaattgtaaatctgttttctttaattcttttataacttctgcagtatcataacaatttgttgcaattgttgaatatctctctgctaaacgatatgcattaatgtaaagctttaaactttctttagctatatcctctgcatcttcaaattttgatgggttagacataactactaattctgcaaatttttctggatcaatattaatagacatgtatttatttacaactcctatttattttgatgtcttaatactaacatattgaagttttcagacaaagtaatgtctctttataattgaagaaaaataattcaaagaatttaatatttactttaaatattagaacgtatgaattaaactagtatttatgagaggatgaacaaaacatgagaataatgtttataggggatatcgtaggtaaaattggacgagacgcaattgaaacgtacatacctcaactgaagcaaaagtataaaccaacagttacaattgtaaatgctgaaaatgcagcgcatggtaaaggtttgactgaaaaaatatataaacaattactaagaaatggtgtagatttcatgactatgggtaatcacacatatggtcaacgtgaaatttatgattttatagatgaagcaaaacgactagtaagaccagcgaattttccggatgaagcgccgggaattggtatgagatttatacaaattaatgatattaaacttgcagttattaatctgcaaggaagagcgtttatgccagatattgatgatccttttaaaaaggcagatcaattagtcaaggaagcacaagaacaaactccgtttatatttgttgattttcatgcagaaacaacttctgaaaagtatgcaatgggatggcatttagatggtagagctagcgctgttgttggaacgcatacacacattcaaacagcagatgaacgtattttaccaaagggtacagggtatataacggatgttggtatgacaggcttttatgacggcattttaggaataaataaaacagaggtaattgagcgttttatcactagtttgccacaaagacatgttgttccaaatgaaggtagaagtgtattatctggtgttgttattgatttggacaaagaaggtaaaacaaagcacatcgaacgtatattgataaatgatgaccatccattttcaacattttaaaattacgtaagtaaacattcgaattgagcactatcgtccattagtatgaatttaatatagtaccactgtttacatagtaaatcggtggttctttttgttatcatttaatatgaaatatatccataggaggcatataactatgaaaccacaattatcgtggaaagttggcggtcaacaaggcgaaggtattgaatcaactggggaaatcttcgctacggctatgaatagaaaaggatattatttatatggatatagacatttttcaagtcgtatcaaaggtggacatacgaataataaaattagagtttctacgacgcctgttcatgcaattagtgatgatttagatattttgattgcatttgaccaagaaacaattgatgttaaccatcatgaaatgagagaagacagtattattttagctgatgccaaggctaaacctgtgaaaccagagggatgtcatgcacagcttattgaattaccttttacagcaaccgctaaagaattaggtacagcattaatgaaaaacatggttgcaataggtgctactagcgcattgatgaatttgaatacaaatacatttgaagagcttattactaatatgttttctaaaaaaggtgacaaggtagttgaagtcaatatacaagcattaaacgaaggttatcaattaatgcaatctcgattacctgaaatctgcggggactttgaattagagtcaacagatgcactaccacatttatatatgattggtaacgatgccattggattaggtgcaattgctgcaggttcacaatttatggcggcatatcctattacacctgcgtctgaagttatggaatatatgattgccaatatatctaaagtaaacggagcggttattcaaacagaagatgaaattgctgctgtaactatggctattggtgcaaattatggtggagtcagagcgtttacggctagtgctggtccaggtttatctttaatgatggaagcaattggattatctggtatgactgaaacgccattagtcattattaatacccaacgaggtggaccttctactggattacctacgaaacaagaacagtcagatttaatgcaaatgatttatggtacacatggtgatattccaaaaatagttgtagcaccaactgatgcagaagatgcattttatttaactatggaagcctttaatttagcagagcaatatcaatgccctgttatagttctaagtgatttgcaattatctttaggtaaacaaactgttgaaaaattagattataatcgtattgaaattaaacgtggtgaaatcattcaatctgatattgaacgtgaagaagatgataaaggttatttcaagcgttacgcgttaacatccaatggtgtttctcctagacctatccccggtgttaaaggaggtattcatcatataactggtgtggaacacaatgaagaaggtaaacctagtgaatctgcgtcaaatagacaacaacaaatggaaaaacgaatgcgtaaaattgagcagttactaattgaatcgccagtagaagctaacttacaacatgaggatgcagatattctttatatcggttttatttctacaaaaggtgcaattcaagaaggtagtaaccgtttgaatcaacaaggcataaaagttaacactatacaaattagacaattgcatccattcccgacaagtgttattcaagatgcagttaataaagcgaagaaagtcgttgtagtggagcacaattatcaaggacaattgtctagtattataaaaatgaatgtcaatattcatgataagattgaaaattatacaaagtatgatgggacacctttcctaccacatgaaatcgaagaaaaaggtaaaataattgctactgaaataaaggagatggtatagatggcgacatttaaagattttagaaataatgttaagcctaactggtgccctggatgtggcgatttctcagtacaagctgcaattcaaaaagcagccgcaaatatagggttagaacctgaagaagtagctatcatcaccggtataggatgttctggccgtctttcaggatatattaattcttatggcgttcattctattcacggacgagcattacctttagctcaaggtgtaaaaatggcgaataaagatttaactgttattgcatctggaggagatggtgatggttatgctattggtatggggcatacaatccatgctttaagaagaaatatgaacatgacgtatatagtcatggataatcaaatttatggtttgacaaagggacaaacatcgccgtcatcagcagtaggatttgttactaaaacaacgccaaaaggtaatatagaaaaaaatgttgcgcctttagaattagcattatcatctggtgccacatttgtagcccaaggtttttcaagtgatattaaaggattaacaaaactaattgaagatgcaattaatcatgatgggttttcatttgttaatgtcttttcaccatgtgtgacttataataaaattaacacatacgattggtttaaagaacatttaacaagtgttgatgacattgaaaactatgattctacagataaacaattagcgactaaaactgttattgaacatgaatctttagtaactggtattgtttatcaagataaagaaacaccatcatatgaatctcaaattaaagaattagataatacaccacttgctaaaagagatatcaaaattactgaagacacgttcaatgcattaactgaacaatttatttaataattaaaactgagtcgtataaatgtatttataacagatccatttatgctactcagttttttactattacaaaaataaaggagttttttaaaatgaaagacacattaatgagtatacaaataattcctaaaacaccaaacaatgacaatgttataccttacgtagacgaggcgattaaattaattgacgaatctggtttgcattttagagtaggtccgttagaaacgacagtacaaggaaatatgaatgaatgtttaattttaatacaatcattaaatgaacgaatggtggaacttgaatgtccaagtattattagccaagttaagttttatcatgtgccagatggcatcactattgaaactttaactgaaaaatatgatgaataacattaaaagtgaagtaaactggatttgaattggcttgttagagatgacgtataactttaactgcttttgcactttatagttaaatttaatataattattaaatgatacgggcaaatagaaaggattttgtaaagtgaacgaagaacaaagaaaagcaagttctgtagatgttttagctgagagagataagaaagcagaaaaagattatagtaaatattttgaacatgtttatcagccgcctaatttaaaagaagcgaaaaaaagaggtaaacaagaagttcgttataatagagatttccaaattgatgaaaaatatcgcggtatggggaacgagcgtacatttttaattaaaacatatggatgtcaaatgaatgcacatgacactgaggtcattgctggtatacttgaagcattaggctatcaagcaacgactgatattaacactgcagatgttattttaattaatacatgtgcgattagagaaaatgccgagaacaaagtgtttagtgaaattggtaatttgaagcatttgaagaaagaacgacctgatattttaatcggagtttgtggttgtatgtcacaagaagagtcagtagtgaataaaattttaaaatcgtatcaaaatgtagatatgatttttggtacacataatattcatcatttaccagaaattttagaagaagcatacttatctaaagcaatggttgttgaagtatggtctaaagaaggagacgttattgaaaatcttccaaaagtccgtgaaggcaacattaaagcatgggtcaatattatgtatggttgtgataagttttgtacatattgcattgttccatttacaagaggtaaagaacgaagccgtagacctgaagatattatagatgaagtacgtgaacttgctcgtgaaggttacaaagaaataacgcttttaggtcaaaatgtaaattcttatggtaaagatttacaggatatagaatatgacttaggagatcttttacaagcaatttctaaaatagcgattccaagagttcgtttcacaacaagtcatccttgggacttcacagatcacatgattgatgttatttcagagggtggtaatatcgttcctcatatccacttgccagttcaatctggaaataatgcagtattaaaaataatgggtagaaaatatacacgagaaagttatttggatttagtaaaacgaatcaaagatagaattccaaatgtagcattaactacagatattattgtagggtatccaaatgaatcagaggaacaatttgaagaaactttaactttgtatgatgaagttggttttgaacatgcatatacgtatttgtattcacaacgtgatggtacgcctgcagctaaaatgaaagataatgtacctttagatgttaaaaaggaacgattgcaacgtttgaataaaaaagttggtcattattcacaaatagctatgagtaagtacgaaggacaaactgtaacagtactttgtgaaggtagtagtaaaaaagatgatcaggttcttgctggctacaccgataaaaataagttagttaatttcaaagcgcctaaagaaatgattggtaaactagtggaagtacgaatagatgaagctaaacagtattcattaaatggcagttttgtaaaggaagtagagccggaaatggtgattcaataaatgtataataaagatgacgtgttgaaacaagcggataatattgcaaataaaattaaaaatttggatactatcaaaacatatcaacaaattgaagcacagattcatcagaaccaaacgataaagactaaaatggatttgttaaaaaagcatcaaaaacaagcagtaaactttcaaaattacgggaaacaaaatgcgctagaacagtcggaacataccattcaaagtatagaagcagaaataaatacattgcctatagttgaacagtttcaaacttcacaatatgaagcgaatcaattattgaaaatgtttgtatcaacaatggaaacacgtttaaatgaccataataaagccaaacatagtgattaattacaaacaaaaaggagaacaatcatatgaaatcaagaaaactggctataactgcacttttaattgcaataaatgttgtattaagcagtattatcatcattcctctaggaccagttaaggcagcaccagtacagcattttgtaaatgtattaagtgcggtcatagtaggtccttggtatggattagctcaagcgcttatatcatcaattttaagagttctttttggaactggtacagcttttgcatttccgggtagtatgattggagttttattggctagtatgttttacatatatcgtaaacatatattcatggccgcggtcggtgaagtacttggaactggtgttatcggaagtttaatttgtataccattagcatatttccttgggcttcaagacttcttcattaaaccgttaatgattacgttcatagtctcaagtgctatcggatctattataagttatttcttattacttactctaaaaaaacgtggtattcttcaaaggtttataaaataattttatgatatatgatttcaaacagagtcattttttattttaatattgaacgcccatacttaattaaatgtcttgaatgttagaattttaatataattctaaacatgctattaacacattttattaggtttgaggcgttttcttatacatttaagatacttcgttattatatggtatgaataggtttgtaaaagtaagtatgttaaaatgtataagttaaataattaataattagaaagcttacaaacgaatatattgtaaagacaaattttaaaaagagacaagggttgtgaagaaataatatgtctaatgttacaccaatgatgcagcaatatttaaaaataaaatcagaataccaagattgcttattattttttagactaggtgatttctatgaaatgttttatgaagatgccaaggaggcatcacgtgtacttgaaattactttaactaaaagggatgctaaaaaagaaaatccaattccgatgtgtggtgttccgtatcattctgcagatagttatatagatacacttgttaataatggatataaagtagctatttgtgaacagatggaagatccgaaacaaacgaaaggtatggttagacgtgaggtagtaagaattgtgactccaggaactgtgatggagcaaggtggtgtagatgataaacaaaataactatattttaagttttgttatgaatcaacctgaaattgcgcttagttactgtgatgtttctactggcgaattaaaggttacacattttaatgatgaagcgactttattaaatgaaattacgacgataaaccctaacgaagttgttatcaatgacaatatttccgatcatttaaaaagacaaattaatatggtgacagaaacaataacagtcagggaaacgttatcatcagaaatctatagtgtgaatcaaactgaacataaattaatgtatcaagcgacacaattattgctagattatattcatcatacacaaaaacgtgatttatcgcatatcgaggatgttgttcaatatgcagctatagattatatgaaaatggatttttatgctaagagaaaccttgagttaacggaaagcattcgattaaaatccaaaaaaggaacgctactttggctaatggacgaaacgaaaacaccaatgggagcacgccgattaaaacaatggatagatagaccactaataagtaaagaacaaattgaagcacgattagatatcgttgatgaatttagtgctcatttcatagaaagagacaccttaagaacatatcttaatcaagtgtatgatattgaacgtcttgttgggcgtgttagttacggaaatgttaatgcgagagatttaattcaacttaaacattccatttctgaaataccgaatattaaagcattactaaattctatgaatcaggatactcttgtacaagttaatcaactcgaaccacttgatgatttacttgatatactagaacagagtttagtagaagaaccaccaatttcagttaaagatggtggactattcaaagttggttttaatatgcaattagatgaatatcttgaagcttcaaaaaacggaaaaacatggttagcagaattacaagccaaagaaagacaacgtacaggaataaaatcgttgaaaataagctttaataaagtgtttggttattttatagaaataacacgtgccaacttgcaaaattttgaaccaagtgaatttggttatatgaggaagcaaacgttatcgaatgcggaacgatttataactgatgaacttaaagaaaaagaagatatcattttaggtgcggaagacaaagccatagaattagaatatcaattatttgttcagctacgtgaagaagttaaaaaatatactgaacgtttacaacaacaagctaaaattatttcagagttagattgtttacagagctttgcagaaattgctcaaaaatttaattatactaggccttcatttagtgaaaataaaacattagaattagtggaatctaggcacccagtagtggaaagagtaatggattataatgattatgttccgaatgattgtcgattagataatgagacgtttatctatttaattacaggtccaaatatgtctggtaaatcaacatatatgaggcaagttgcaattattagtattatggcgcaaatgggtgcttatgttccttgcaaagaggctgtgttacctatatttgatcaaatattcactagaataggtgcggcagatgatttggtttcaggtaagagtacgtttatggtagaaatgctagaagcacaaaaggcattaacttatgcaacagaggatagtttgattattttcgatgaaattggacgtggtacttcaacgtatgacggtttagctttagcgcaggcaatgatagagtatgtagctgaaacatcacatgctaaaacgttattttcaacacattatcatgaattgacaacattagatcaagcattaccaagtctaaaaaatgttcacgtcgctgctaatgaatataaaggtgaacttatattcttgcataaagttaaagatggtgcagttgacgatagttatggtattcaagttgcgaaattagctgatttacctgaaaaagttattagcagagcacaagtgatcctaagcgagtttgaagcgtctgctggtaaaaaatcatcgatatcaaatttaaaaatggtcgaaaatgaacctgaaattaatcaagaaaattcaaacttatgtgttgaagaaacaactgatactttatctcaaaaagactttgaacaagcatcatttgatttgtttgaaaatgatcaagaaagcgagattgaactacaaattaaaaatttgaatttatctaatatgacaccaattgaggcattggtgaagttaagtgaattacaaaatcaattaaaatagaggtgttgcaaaatggggaaaattaaagaactccaaacctcattagcaaataaaatcgcagcaggtgaagtagttgaaagaccgagttctgttgtgaaagaactgttggaaaatgctatagatgcaggcgctacagaaataagcattgaagtagaggaatctggcgtccaatctattcgcgtagtcgataatggaagcggaattgaagcggaagacttaggattagtatttcatagacatgcgactagtaaattagatcaagatgaagatttatttcatattaggacattaggattccgtggtgaagcactagctagtatttcatcagttgctaaagtaacattgaagacttgcacggataatgctaatggaaatgaaatatatgtagaaaatggtgaaatattaaatcataagcctgcaaaagcgaaaaaaggaacagatatacttgtagaatcattattttataatacaccagcacgtttaaaatatattaaaagtttatatactgaactaggtaaaataactgatatagtcaacagaatggcaatgagccatccggacattcgaatagcactcatttcagatggcaaaacaatgttaagtacaaatggttcaggacgaactaatgaagtgatggcagagatctatgggatgaaagttgcacgagatttagtacatatatctggagatacaagtgattatcacattgaaggttttgttgcaaagcctgaacattctagaagtaataagcactatatttctatttttattaatggacgatacattaaaaactttatgctaaataaagcgattttagaaggctatcatacactcttaacaataggtaggttcccgatttgttatattaatattgaaatggatccaatcttagtagacgttaatgttcatccaacaaaactagaagtgcgtttatcaaaagaagagcaactatatcaattgatagtgagcaaaatacaagaagcatttaaagaccgtatattaattcctaaaaataacttggattatgtgccgaaaaaaaataaagtgttacattcattcgaacaacaaaaaatcgaatttgaacaaagacaaaacacagaggataaccaagagaagacgttttcatctgaagaaagtaaccgtaagccatttatggcagaaaatcaaaacgatgagatagttataagagaagattcatataatccattcgtaacgaaaacgtctgaaagtttaatagctgatgatgaatcttccggttataatgatacacgtgaaaaagatgaagactacttcaaaaaacaacaagaaattttacaagaaatggatcaaacatttgattcaaatgacgatacttctgtgcaaaattatgagaataaagcgtctgatgattattatgatgtgaacgatattaaaggaacaaaaagtaaagaccctaaacgaagaattccatatatggaaattgttggccaagtacatggaacgtatattattgctcaaaatgaatttggcatgtacatgattgaccagcatgcagctcaagaaagaataaaatatgaatattttcgagataaaataggtgaagttaccaatgaagtacaagatttattaatcccgttaacatttcatttttcaaaagatgaacaattagtcattgatcaatataaaaatgagcttcaacaagtaggtatcatgttagaacattttggtggtcatgattatattgtaagtagctatccagtttggttccctaaagatgaagtagaagaaattattaaagatatgattgagctaattttggaagagaaaaaagtagatatcaaaaaattacgtgaagacgtagcaatcatgatgtcatgtaaaaaatctattaaagcgaatcattatttacaaaaacatgaaatgtctgatttaattgatcaattaagagaagcggaagatccatttacatgtccacatggtcgtccaattatcattaatttttcaaaatacgaattagaaaaattatttaagcgtgtgatgtagagaggatgaatcaattgaataacaacatattgcctgccataagaaacattaaagatctagagaaactgattaaaacagattataaaatgtgtgtgcttctagatatgcatataggacatattaaaagtattatggaattgctgaagcaaaatcatatagagtgttttattcatatagatttgataaaaggtttaagtcacgatgaatttgcaagtgaatttattattcagcaatacaagccaaaaggtattgtatcgactaaatctaaagtaataaaaaaagcgaaatcattaaatactttaacgatttttagagtttttattattgatagtcaagcattgaaacgcagtatagatttgataaaaaaagttgaacctgattttgttgaagtacttccaggtgttgcgagtaaagcgattcatcatattcagaaagaaacaaacacacaagtcattgcaggtggcctaattaatacaatagatgaagttaatgtagctgttaaaaatggagcgaaatatgtaacaactagttatgataaactttggtaaatcataagtctgcaaaaatttcattttttcacgagatttagtcatataacatattaaaaaagccgttttcgtatgggatatgcaataaggaatttaaggtatcatacaaagaataattaaataaaataattagcacctctaaaacgattaaaatcattaaagttatagaggtgtttatttgtaaataatgcaattagtcacaaaaatatggctgaagaatgtcaattaaacaaaagggcttcataaataaattagttaggtttgatatttctagttttcaaattaaatcacttttataaagacttgaaaaattaaatttgacaaaatttttacaaaaaccattgacaacgctttcatctcaatagtattataacaaatataataaaagttaatacatagaatagagacgggagatttctacgagccaaactgctagtgtaggaatctctttgtctttttgggaggacatttaatatgaatgtatatttagcagaattcctaggaactgcaatcttaatcctttttggtggtggcgtttgtgccaatgtcaatttaaagagaagtgctgcgaatggtgctgattggattgtcatcacagctggatggggattagcggttacaatgggtgtatatgctgtcggtcaattctcaggtgcacatttaaacccagcggtgtctttagctcttgcattagacggaagttttgattggtcattagttcctggttatattgttgctcaaatgttaggtgcaattgtcggagcaacgattgtatggttaatgtacttgccacattggaaagcgacagaagaagctggcgcgaaattaggtgttttctctacagcaccggctattaagaattactttgccaactttttaagtgagattatcggaacaatggcattaactttaggtattttatttatcggtgtaaacaaaattgccgatggtttaaatcctttaattgtcggagcattaattgttgcaattggattaagtttaggcggtgctactggttatgcaatcaacccagcacgtgatttaggaccgagaattgcacatgcgattttaccaatagctggtaaaggtggttcaaattggtcatatgcaatcgttcctatcttaggaccaattgccggtggtttattaggtgcggtagtatacgctgtattttataaacatacatttaatattggttgtgcaattgcaattgttgtagttattattactttgattttaggttacattttaaataaatcatcaaaaaaaggtgatatcgaatcaatttactaaaataaaaagaaacgtaaatagcataatttaacatgtttgattcatggattatgctattttttcgccaaaatttaacagattttgtacaatgggttagcgattatttttttaataaaggagatactacgaatggaaaaatatattttatctatagaccaaggaacaacaagctcaagagcgattttattcaatcaaaaaggggaaattgcaggggtagcacaacgtgagtttaagcaatattttccacaatcaggttgggttgaacatgatgcaaatgaaatttggacatctgtgttagctgtaatgacagaagtaattaatgaaaatgatgttagagctgatcaaattgccggtattggtattacaaaccaacgtgaaacaacggttgtttgggacaaacatactggtcgtccaatttatcacgcaattgtttggcaatcacgtcaaacacaatcaatttgttcagaattaaaacaacaaggatatgaacaaacatttagagataagacaggattacttttagatccgtattttgcaggtacaaaagttaaatggattctagacaatgttgaaggtgcacgagaaaaagcagaaaatggcgatctattatttggaacgattgatacttggttagtatggaaattatcaggaaaagctgcgcatattactgattattcaaatgcgagtcgtacattaatgtttaatatccatgatttagaatgggacgatgagttattagaactacttacagtacctaaaaatatgttgccagaagttaaaccttcaagtgaagtatatggtaagacaattgattaccacttctatggtcaagaagtaccaatcgctggtgtagctggagatcaacaagcagcattatttggacaagcttgcttcgaacgtggtgacgtgaaaaacacatatggaactggtggcttcatgttaatgaatacaggtgataaagcggttaaatctgaaagtggtttattaacaacaattgcttatggtattgatggaaaagtaaattatgcgcttgaaggttccatctttgtttcgggttcagcaatccaatggttacgtgatggattaagaatgattaattcagcaccacaatcagaaagttatgcgacacgagttgactctactgagggtgtttatattgttccagcatttgtaggtttaggaacaccatattgggattctgaagcacgtggtgcgattttcggtttaacacgtggaactgaaaaagaacactttatccgtgcaactttagaatcattatgttaccaaactcgtgacgttatggaagcaatgtcaaaagactctggtattgatgtccaaagtttacgtgtcgatggtggtgcagttaaaaataactttattatgcagttccaagcagacattgttaatacttctgttgaaagacctgaaattcaagaaactacagctttaggtgctgcatttttagcaggtttagcagttggattctgggaaagtaaagatgatatcgctaaaaactggaaattagaagaaaaattcgatccgaaaatggatgaaggcgaaagagaaaaattatatagaggttggaaaaaagctgttgaagcaacacaagtttttaaaacagaataaacttgtagattagacttttgtataaacattgtgatacaatcaatttaagttaatatttgaatcgagaaacgagagatttgttcgaacatgtacaattgaaggattgtttatgtgggacaagtctctcgtttttacattttttaggaggcgttttggaatggcattgtctacttttaagagagaacatattaaaaagaatttaagaaatgatgaatatgatttagtaattattggtggcggtattacaggtgcaggtattgcactagacgcgagtgaaagaggaatgaaagttgcattagttgaaatgcaagactttgcacaaggaacaagctcaagatctacaaaattagtccatggtggtttacgttacttaaaacaattccaaattggagtagttgccgaaactggtaaagaacgtgcgattgtttatgaaaatgggcctcatgttacgactccagagtggatgcttttaccaatgcataaaggtggaacatttggtaaattctcaacatcaattggtttaggaatgtatgatcgtttagcaggtgttaagaagtctgaacgtaaaaaaatgttatctaaaaaagaaactttagctaaagaaccattagttaaaaaagaaggtctaaaaggcggcggttactatgttgaatatcgtactgacgatgcgcgtttaactattgaagttatgaagcgtgctgctgaaaaaggcgcagaaattatcaactatactaagtcagaacacttcacttatgataaaaatcaacaagtaaatggtgttaaagttatagataaattaactaatgaaaattatacaattaaggcaaaaaaagtggttaatgcagcaggtccatgggttgatgatgttagaagtggtgattatgcacgcaataataaaaaattacgtttaactaaaggtgtacatgttgttattgatcaatcaaaattcccgttaggtcaagcagtatactttgatactgaaaaagatggaagaatgatttttgcaatcccgcgtgaaggaaaagcgtatgtaggtactacagatacattctatgacaatatcaaatcttcaccattaactacacaagaagacagagactatttaatcgatgcgattaattacatgttcccaagtgttaatgttacagatgaagatattgaatcaacatgggcaggaattagaccattaatttacgaagaaggcaaagacccttctgaaatctctcgtaaagacgaaatttgggaaggtaaatctggtttattaacaattgcaggtggtaaattaacgggctatcgtcacatggctcaagacatcgttgatttagtatctaaacgcttgaaaaaagactacggtttatcattcagtccatgtaatacgaaaggccttgcaatttcaggtggagatgttggaggcagtaagaactttgatgcgtttgtagagcaaaaagtagatgtagctaaaggattcggcattgatgaagatgttgcaagacgtttagcatctaaatatggttcaaatgttgatgaattgttcaacattgcgcaaacatctcaataccatgatagcaagttaccattagaaatttatgtagaacttgtttatagtattcaacaagaaatggtatacaaacctaacgatttcttagttcgtcgttctggtaaaatgtacttcaatattaaagatgtattagattataaagatagtatcatcgatattatggctgatatgttagactactcaccagctcaaattgaggcttataccgaagaagttgagcaagcaattaaagaagcgcaacatggaaataatcaaccagcagttaaagaataattaatttgtacaatcataaactggtgtcctgttttaagggcatcagtttttttgcatctattcaaaaggacaattgaaagtatttaattctatatgtatgataataataaaaagtgattttaaataattgttataaaaggtgtgatacgatggctgaaaaacaatttaaattaactgtacaagataacacgaatattgaagttaaagtgaattttacagatgtagattcaaaaggaattattcatatatttcatggtatggctgaacatatggaacgttacgataaattagcacatgcactttcaaagcatggtttcgatgtgatacgtcataatcatcgaggacatggtattaatattgatgaatcaacaagagggcattacgatgatatgaaacgagttatcggtgatgcctttgaagtagcgcaaacagtgagaggcaatgttgataagccatatattataattggacactcaatgggatccgttatagctagattgtttgtagaaacatatccgcaatatgttgatggtctaattttaagtggtactggtatgtatccattatggaaaggattaccaaccgttaaggtgttacaactgattacaaaaatttatggttctgagaaacgggttgaatgggttaaccagttagtatcaaatagttttaataaaaaaatacgtccattacgtacacaaagtgattggatttctagtaatccaactgaagtagacaactttattaaagatccatatagtggatttaatgtgtcaaatcaattattatatcaaacagcctattatatgctacatacatcacaattaaaaaatataaaagtgttaaatcatgccatgcctatattattagtttcaggatatgacgatcctttaggtgattatggtaaagggattttaaaattggcgaatatatatagaaaagccggcattaaaaatgttaaagttaatctttatcatcataaacgtcatgaagtgttatttgaaaaagatcatgacaaaatttgggaagacttgtttaaatggttgaatcaattttataaaaaataaagaaagtggaattaaatatgaataaaaataagccttttattgtagtaattgtggggccaactgcttcaggtaaaacagagcttagcatcgaactcgcgaagcgtatcaatggtgaaatcataagcggtgactctatgcaagtctacaaacatatgaatattggaactgcaaaagtaacacctgaagaaatggatggtattccacatcatttaattgatatcttgaatcctgatgatacattttcagcatatgaattcaagcgattagcagaagatttaattactgatataacgaatagaggtaaagttccaatcatagcaggtggaacaggcttatatattcaatcattaatatataattatgaattagaagatgaaacagttacacctgcacaattatccgtagttaaacaaaagttatctgcattagaacatttagataatcagcaactacacgaatatttagctcaatttgacgaagcttctgccaaaaatattcatccaaacaatcgacagagagtattgcgcgctatcgaatactattttaaaacaaaaaaacttttaagtaatcgtaagaaagtgcaacaatttactgaaaattatgatacattattaatagggattgaaatgtcgcgtaaaacattatattcaagaataaataaacgtgttgatattatgttggatcacggattatttagagaagtgcaacaacttgttgaacaaggctatgaatcttgccaaagtatgcaagctattggatataaagaattaatacctgtgattaacggacaaatgatttatgaagatgctgtcaatgatttaaagcaacattcacgccaatatgcaaaacgacaaatgacatggttcaagaataaaatgagtgttcattggttaaataaagaaaatatgtcacttcaaatgatgttagatgagattacaacccagattaagtaaaaggagtccgacagatgattgcaaacgaaaacatccaagacaaagcactagagaattttaaagcaaaccaaactgaagtaactgtattctttctaaacggtttccaaatgaaaggtgttattgaagaattcgacaagtatgtcgtaagcttaaattctcaaggcaaacaacacttgatttacaaacatgcgatcagcacttatacagtagaaactgaagctcaagcatctactgaaagtgaagaataagttgtaatcatatgggcacgatttaatgactcgtgtacataacgtttgaagtatgataaatagatatagaaataaagtcatatgtgacatcaattaaatgatgctcaaatgacaagatacaatagaggaatgtttgtaataaaaacgcttcatataaaggtcgagtcactatatgatacgactttatatgaagcgttttatttgctatgagctagtatattttataataacttttctatttctctttcgatttgaacaggttttttttgaggtgcaaatcgtttaacaacgttaccttcacgatccactaaaaacttagtgaaattccatttgattttctcattaaagaatccatgttgtgccgcagtcaaatatctaaataaaggtaattgttgttccccttttacgtctattttttgatgcatagggaaggtaacaccatagtttaatttacagttttgagctgcttcttcgcctgatccaggttcttggccaccaaattgattacaagggaaacctagaattacaaacccttgatctttgtatttctcgtataatgattgcaaaccttcgaattgtgaagtaaagccgcattcgctagctgtattgacaattagcataacgtcacctttatatgcatctaatttgtaagtaacacctttatttgtttctactacaaaatcataaattgtctccattgaatcatcctttcgatttacttaaaatgtaccataaaatcgtgtaatagtctttactaaaactctatgatagaatactttgagtagcattttattaaggagatgtataacatggctcagcaacaaattcatgatactaaaaataaactagaaaaagctgtcttagtcggtgtacatgctcaagatgataagcaatttaattttgagtcaacgatggaagaattatcatcattatcagaaacttgccaacttgaagtgttgggtcaaattactcaaaacagagatcgtgtagatcgaaaatattatgttggtaaaggtaaaattgaagaaattcaagcatttattgagttcaaagatattgatgtagtcatcacaaatgatgaattaacgactgctcaatccaaatcactaaatgaagctttaggtgtaaaaatcattgatagaacccagttgattcttgaaatatttgcattaagagcaagaagtaaagaaggtaaattgcaagtagagctagcacaacttgattatttattacctagattgcaaggccatggtaaaagtctttctcgtttaggtggcggtattggaactagaggccctggtgaaacgaagttagagatggatcgtagacatattcgaactcgtatgaatgaaattaaacatcaattgcgaacggtagaagaacatcgcgaaagatatcgaaataaaagaaatcaaaatcaggtgtttcaagtagctttagttggttatacaaatgctggtaaatcatcatggtttaatgttttagcaaatgaagagacgtatgaaaaagatcaattatttgcaacgttagatcctaaaacacgacaaattcaaataaatgatggatttaatttaattatttcagatactgttggttttatacagaaactacctacgacgctaattgcagcttttaaatcaactttagaagaggctaaaggtgcagatttattagtacatgtcgtagatagtagccatcctgaataccgtacgcagtatgacacagttaatgatttaatcaaacaattagatatgagtcatatttctcaaatagttatttttaataaaaaggacttatgtgatcatgcatcaaatcgtccagcaagtgatttgcctaatgtttttgtttcatctaaaaatgatggtgataaattacttgttaagactttatttattgatgaaatcaaaaggcaattaacttattatgatgaggcaattgcgacgaataatgcagatcgattatattttctaaaacaacatacattagtgactgaacttaaatatgatgaaattgaaaatgtttatcgtataaaagggtttaaaaaataataaaaggacgaaattcaaatgaaagatataagtaagatagtagctgacgtcgaatcaacgttagcaccatattttaaagaaattgaagaaactgcatatattaaccaagaaaaagtattaaatgcatttcatcatgtcaaagcaaccgaaagtgatctacaaggatcaacaggatacgggtatgatgattttggacgtgaccatttagaagaaatatatgcgcaggcatttaaagcagaagatgcaattgttcgcccacaaattatttcaggtacgcatgcgattactattgcattacaaagtttattaaaacatggtgatgaattaatttatataacgggaagtccatatgacactttacttgaagtcattggtgtaaacggaaatggtattgaaagtttaatggagcacggcgtatcatataaagatattgcacttaaagaaggtaagatcgatattgaaaatgtgttagatgggatttctgagcgcaccaaagtaatagcgattcaacgttcgaaaggctatgatcaaagaccttcaattcctctagatgaaattgaacaggtgattactaggttgaaagaagtgcatcctaatattttaatatttgtggataactgttatggggaatttgttgaaagacgtgaacctatagaatgtggtgccgatttaatagcaggatcattaattaaaaaccctggcggtggtttagctaagattggtggatacattgctggtagaaaagatttaattgaacgatgtggttatagattgacagcacctggtattggtaaagaagcgggtgcatcattaaatgcattgcttgaaatgtatcaaggtttctttttagcaccacacgttgtcagtcagagtcttaaaggtgcattgtttactagtttatttttagaaaaaatgaatatgaacacaacgccgaagtactacgaaaaacgaactgatttaattcaaacagttaaatttaaaacgaaagaacaaatgatttcattttgtcaaagtattcaacacgcatccccaattaatgcacattttagtccagaaccgagttatatgcctggttacgaagatgatgttattatggcagctggtacgtttattcaaggttcatcgattgaattatctgcagatggacctattcgtcctccttatgaagcatatgttcaaggaggattaacatatgaacacgttaaaattgctgtgacaagagctgttaatcagttgaaagaacaaggacttatataatagattaaatttcaccctaaatgataatgtgttttgggtgaaatttttttacgaagatttatcagattatttttaaaaattgaaaaaatattttaactgtgggtcgttttatggcgttttagaagtcgaaatcgcagttatatcaatgttttaagctttatgttagaaaacctgacatatttttgaaatcctaaaaaaattatgataagttattaacaagttcaaaagtagaggagaggaacaatgatatcgaatgatgcaatcagacgaaatatggctgtcttctctatgagtgtagtaagtaagttaacggatttaacgccaaggcaaatacgttactatgaaacacatgaactcatcaaacctgaaagaacagaaggtcaaaaacgtctgttctcactcaatgatttggaaagattactagaaattaaatcattattagaaaaaggatttaatatcaaagggattaaacaaatcatttatgactcacaagagcatttaacaacagatgaacaagagataagaaaaaagatgattgtagatgccacgcaaaagcctattggagaaactttgccaataaatcgtggtgatttatcccgatttattaaataaaatttggaggattttaaaatgccaaaacgtactttcactaaagacgacattcgtaaatttgcagaagaggaaaatgtaagatatttaagattacaattcactgatattttaggaacaattaaaaatgttgaagtgcctgtaagccaattagaaaaagtacttgataacgaaatgatgtttgacggttcttctatcgaaggtttcgtacgtatcgaagaatcagatatgtacttacatccagatttagatacttgggtaatcttcccatggactgctggacaaggtaaagttgcacgtttaatttgtgatgtttataaaacagatggtacaccatttgaaggggatcctcgtgcaaacttaaaacgtgtattaaaagaaatggaagatttaggctttacagactttaacctagggcctgaaccagaattcttcttgtttaagttggatgaaaaaggggaaccaactttagaacttaacgatgatggtggatatttcgacttagctccaactgatttaggtgaaaattgccgtcgtgatattgttctagaattagaggatatgggcttcgatattgaagcaagtcaccatgaagttgcaccgggtcaacatgaaatcgactttaaatatgcggatgcagttacagcatgtgataacatccaaacatttaaattggttgttaaaacaattgcgcgtaagcataatttacatgcaacattcatgcctaaaccattatttggtgtgaacggtagcggtatgcactttaatgtttcattattcaaaggtaaagaaaatgcattctttgatccgaatactgaaatgggcttaacagaaacagcttaccaattcacagctggtgtacttaaaaatgcacgtggatttacagcggtatgtaacccattagtaaactcatataaacgtttagttcctggttatgaagcaccatgttatattgcatggagcggtaaaaaccgttcaccattaatccgtgtaccatcttcaagaggattatcaactcgtattgaagtacgttcagtagatccagctgcaaacccatacatggcgttagctgcaatcttagaagctggactagatggtattaaaaataaattaaaagttccagagccagttaaccaaaatatttacgaaatgaatcgtgaagaacgtgaagcagtaggcattcaagacttaccttcaacactttacacagcattaaaagcaatgcgtgaaaatgaagttattaaaaaagcattaggaaatcatatctataatcaatttattaattctaaatcaatagaatgggattactacagaactcaagtatctgaatgggaaagagatcagtacatgaagcaatattaatacgctaaacaattgatgggaaatcagtaatatcaagggctagagcaatttcgctttagctcttttttggtcatatgatttatatatgtgcacagtttgattttttaaatcaaaatcagaaatacgtaaagccaaggcttctccaactctacaaccaagctctatcgctgtataacaaacgaaatattgatatatgtttctctttttaattaattgtaaaaattctttaacttcatgagcttctaaccattctattgactttggcggtttgtaatcaggaatattacaaattagacatggattattagataatgcgccttgtaaaacagctttttctataacgttatttagcaattggcgtgtttgttttgctgtacttctagaataattttctgatttcatccaatttagaaattgttgatacattatcggtgttatatctttaatataaacgtttttaaaaaactttattatccttctttttgtatatatttcattctgatatgtgctatatgcaatattgtttaatctaaaagtagctaaataaagttcaatccatgcttctagtgtaatattattatcaagtaatacaaagttttctgtgtctgcttctacactagcagcccatttcctagcctctgatttagtattgaatgttttagttattggttttcgctcgtgtgtatataaatcataataattaactctagcttgatatttattacctcgttttcttatagatgccatattgtttacctccctaaaataaatgaaagggcaggaattctgcccaattaaattatttgtctaagtggtcgattgcgtattgtgcttctgaaggtgtaaatcgtcctccgtattctgaaattaattgatcataaatttctctagtagacatattcaaacttttggcatatgatttagcactttctaatgcgtttttattatagtcagcttttaaatgatctattgcgtattgcgcatcatctttagaaaatttgtttccgtattctgatgttaattgatgatatatgtttttctttgatgaatgtaagtattctgaataaaactcagctatttttaaagctgctttttggtcacgtgttatactgtcatctatgctagaactagagcttgtagttgaactatcagatgttccttttgtaatcgtgtcaaaccattcttgataattaccatttgtttgttcttttgctttttcgtgattctcttcatctttatcagtgatactgtcagatttatcgctttcactacttgaatctaaattcgctacataaggtttaatcatctgaacttgtccaatataagttatactagctaaagcaataaccactataactacagtaataattgtcctaactaaagacggccatttgctgaatttccacattaaaaataagcctaaaggaaataggaataaaagtgataaaacaatacaccactcttgtttgtaccatgatgttgattcttgttgcatttaaacgcctcctaaataatttcttgatgaatacttaacacatcggttttgaacatattgagaaaatgtaaatctgagtacttaactttatagaagtatattgttagtaagatgtctgttacaggcactttaaaataagcgcttaactgaggtatagttttgcagtcatgtagatatatcgcttgtttaatttgatttaaggggattaataattcaaaatcatgacaatgacagtgatacaaagacatgggttctttaatttcactcggtgatgtagatgatgataaattcttattaatatataaatcattacctataatcagacattctaatttatccggcatctcaatatatttaatctttatatcatccatcaactccttgtattgatgcataatttcactcctttattaaattttgatttatatttcggttgttatcatctccaattaacagaagtttaattatgcataatttgatatataaaaaaagaaagacgtagtaatactaatacaatgattagtaaaatgagcgtctttctttatttatcgctatttgaatttgtatttcttttacttttaatatattcgatgaagttcacaatttctttcatctcttcatctgtgacatcatcttttatatgtgctgcgatgatttgttcattttgatttaaatgacgttcctcatcagtaggacgttcagatgaaacatcataacctaatagccaagcttcactaacatttagaactttggcaataatgtaaattttatcttgtttggcttcatacttgcccttaagataatcacttattgaatttcttccaatacctgttaatcttgaaagttctgattgtgacatattcttggcaattatagcttcacgtaatctttctttgaaactgttcacttttctgaacacctcccatatttatattagtactttttgctaatatttacaacaatttttaacaaattatgttaaaaaaagtattaaaactagttgacttattttaacaacaatgatttaataagtttgtacagaaaaccgaacatgagggaggtgatattatgaaaagtacatttgattacaacttactaatggacagaatgaatgaatatagatacagtcaaaattcattagctaatgctatacctatttcaagaacatcgataaatcacaagttgaaaggtaaaaatttatttacacaatgggaaataaaaaggatttgtgaactattagatattccgcccaacaaagtagggcaatatttttttaaagtaaaagttcggaaaactgtacaatagctttcgaatcactggaggtcaacaatgaaaaatatatgtattgaaataaataatgattatttaaacggattagtacaaaagaaagttgatgaaatcttaagtacatacaagaggcaagttgcaactgtagatattaaagatttagtggagattacaggtttaagtaaagcaacgctaatacagaagatagtctatgaacctgaaattgtagcagtgacaagacgagtaggcactagagtgttatacctttatccgcaagtattagatgcttatcaaacgttaatcaatcgaattggaggacattaaccacatgagtaatagtcaattattcaaaaacgaaacagaacgagctgattgtatgaaaaaaattctaaatgatcaactgaaaataaaactagagaacgagaaagttatacaaattaaggatttaaaaagaattttaaaaacacataatcgacgactgagggaggatgcgaatgtctaacacatataaaagttacatcatagcagtaatgtgtataacaattttagcaatttgtttaatgccatttttgtacttcacaacagcatgggtaattgctgcaagtactggcattgcaatattcattttctatgatgagtatttttttagagaataaaaaaactgattgctaacggcaattagcaatcagaaattaaaaaacaattaacaaataaattatatcaatattgggggaagacaacaatgaaaaatgaatttaaaaacatgagcagacaagaattaagagatttattggctaaaaagaatggagaattgtttgaattagtgaatgaaatcaataaagaaactgaatttgacgttttacttttttcaactgtaggggttagtaatggacatactacatcatcgtcacattgtgcgcttggggatattgcaggtcttgctaatttattgaataacgaaaatgattaccacgatatcgcaaatgttatcgaaatgtataaattaaaaaaatttttaggtatagatgacgacaaggatgatgacaacaatgaagaatgatgctaatgaaaagatgtttgttctatatcaacaattatttgatgagtttaagaaaacaaatgaaaactgcttgttggaaatcgaacagacatcaacctcacagattattattaattttttacattatcacgatagttataaaacaaataataagttgttacagatattagaagtatatccagagtcacatgaacggatgaagaactatattatatcggtaatgcgtgggcagatattagttaagaaaggtgtttagttttatgaatgaattacaagcacgagaactagaaacatttgaacaagatgaccggtttcaagtcacagatttaaatagcgctaactgggtttttaaaaagttagacgcaattacaacaaaagagaatgaagttaaggaactggcaaacagtgaaatcgaacgtataaatttatggcgcgataaagaaattgagaaattacaaagtaataaggaataccttcaaagtcttgtgattgagtatttcagaattgaaaaagagaaagataaaaaatttaagttaaatacgccatatggcaaagtaacctctcgaaaaggggcaaaagtgatacaagttagtaacgaaaacaaagttattgaacagcttgaacaacgtggactgaatgactatgtaaaattgacaaaaaaacttagtcaatcagagattaagaaagatttcaatgtaactgaaaatggcacgttgattgatgtgaatggcgagattttagagggcgttagaattatcgaaaaaccaacatcttacacagttaaggtgggagaatagatggctgaaaaaactattcaagacgtcgatattttaaggcaactaggtgtgaaagatatcagcaaacaaaatgctaataagttttataaattcgctatttacggaagattcgggactggtaaaactacatttttaaccaaagataataatgctttagtactagatataaacgaagatgggacaacggtaactgaggatggtgcagttgtacaaatcaaaaactatgagcattttaggacagtaattcaattgttaccaaaagttatagaacagcttagggaaaatggcaaacaaatcgatgttgtagtaatagagactattcagaagttgagagatattacgattgagaatgtcatgaaaggtaagattaaaaaaccgacatttaatgattggggcgagtgtgcttcgcgaattgtaagtatttatcgatatatttctaaattacaagaacagtaccaatttcatcttgctataagcgggcatgagggcatcaataaggataaagatgatgagggtagcactatcaatccaacaatcacgatagaggcacaagatcaaattagaaaagcaattattagccaatctgacgtgttagcaagaatgacaattgaagagaatgaacaagacggcgaaaaatcctatcaatatgtacttaacgcagaaccatcagatttatttgagactaagataagacatgctagcaatataacaatttcaagtaaaaaattcgttaatcctagtattaatgatgtagttcaagcaatcagaaatggaaactagaaattaactaaaggcggtaaaaaatcatgaaaattagaggtagagcactatacattcaagaaactaatcaagaggcattcatgaaaggcggggagtttttaggagctggagaattcacagttaaagttgcaaatgtcgagtttaacgacagagaaaacagatacttcacaattatttttgaaaacaacgaaggtaaacaatacaaacacaaccaatttgtcccaccattccaacaagattttcaagaaaaacaatatatcgagttacttagtagattaggaattaaattgaacttacctgatttaacttttgacactaatcaattaattaacaaaatcggaactatagtgttgaaaaataagtttaacgaggaacaaggtaaatactttgtaagactttcatatgtaaaagtttggaataagggcgatgaagtagttaataaaccagaacctaaaactgatgagatgaaacaaatagaacagcaagtaaatgggaaacagacgccaatgagccagcaatccaatccattcgttaatgcacctatagaaattaatgacgatgatttaccgttctaatgaggtgatttaaatggctggctggataaaaatacatcgtaaaattatagaccattggatttggacagattctaagagactaaaatggtggatggatttattactattaaccaatcattcagataaaaaggtaatgttaggtgggaaattagttgttttaaagcgtggttcttttcatacatcagaattaaaattatctgaacgatggaacgtacctagaaacacagttagaaattatttgaatgcgttagaaaaagacaccatgataaccactaaaaagacaaaaaacggaacaactataatagtgcataactacggtatttatcaagataatgatgattataaaaaacaacagactgaacaactaagtgaacaacagactgaacaactaagtgaacaacagtgtgaacaaaagaatgaacaacagagtgaacaaaagaaagacaatagactgaacagaacactgaacaagactaaagaattaaagaatataaagaatgataagaatgtgaagaatatgaagaaggagaagaagaattataaagtcttcgacttctttcaagaaaatggatttggatttatcactcagtatattcttgaagacataaattattatctagatgctttttgtcaagattcggatgaaattttgattgctgcactgaagatagctaaagacagaaataaagttaattggggttacgctaaaagtattttaaattcttggttacaaatgaatttaagcaactacgatcaaattaaagcttatgaagctcaatataaagccacgaaaaaaatgcagaataagcaaaaacaaaattataagtctaaagaaaaaacgccaagttggttaaccaatcaaaatcaaaatacagctgtccaagttgatgaagaatttgaaaaagacagggctgaatttttaaaaaaattaaatgctcattggggtgattaggtgttaagactaaataatatttgtggcgatgcatcagcaaatcgacaatatacgcttagaaaaaataaaagtctgattaaacaatttttcgacagcaaacaatatttataccaagcagatagaaaagttgctcatgttcatgtagtgaatgacatatatcttattcacgggcatcacaaaacgatgtttaaaggcgtgaaaaagacattcaataataaattagaatttgctaactacattgaaagtaacgaattgtatttcgaaaaggcaaaacaactcagtttgttttaaggaggaacaggaagatgaaaaaatttaatattcaaatcacatacactggcatgattgaagagactatcgaggctgaaagtttagacgaagcagaaaatgaggcgcatgatattgcgagaatggaagtaccatttgattgtgatgaatatgaaattaatgtagaggaggaataggaataatgaaaacatatccagcattagcatttgaacataaagacgaatcaggcgtatacattggtgaatttgatgggtggtgccaagctttagatgaggcaatactatttgcaaataaagacggaagtaaaccggataaaaagatagctaaagaaatctttttgagggaagaaaaaatttgagtgatatcttaaaggaacgttacggagaagatgcaattcaaaattacagaccgagtgaatggtttaaaacatgtaatttagtagatgttgaaattagtgaagaaaaatttaaggagttgcttaataatgactaattcattaactattgatgaattaattggaaaagtagaacaatggagtgttgaccgtaatataaatcatgcaagtcccttaaagcagtttgataagttgatcgaagaacatggagaactagtacgaggattaaataaacaagatatgcaattaattaaagatagtataggtgacatgtttgttgtattaataatcatgatgcaacaaattaaaggcaatattaaattagcgttaagcctatctgatttcggtgaaggtgaggttaatactttaaattatattaaatcactattttacttaggtgaaaaactagaagattttatgtctgataataataatggcaatttgtttagtgaaattcaaactttgattacaaacattacctatttacttaaagaaacggcatataaaaatagttccgatttaagaacatgtttagcacttgcctatgatgaaatcaaaaacaggaaaggcaaaatgattgatggtaaattcgtaaaagactcagatttaaaatgcgattaaaatgctactaatatttgatgaggtgttgcaaaaatgaagtcaatagagtttgcaagtaacgtgcaagtgatataaccccgaaatataagcagaatttaagtgaaatgcaagtaacgtgcaagtgaaagaggtgtcgagtaagtggcacaatacttagtcacaacattcaaagcttcaacaggacgtaaacatacatacataactagagctaagagcaatcaaagatttaatgaggtgttgcaaaagtgaaatcaatagcaaccttagaagcggaacagtatttatatgattcactgatcatagacaaaatgggagtgtgtggatgtcatgaggtagtcattgggcgaaagcctctcacacatgggcatgaaatcgtggactttttaacctatgatactaaaaatatttttagagcatacgaaattaaagtatcaaaagcagatttaaagagttcagctaaattgtcttttgtaggtcattataattatttagttttaccgagaaacctatatgaagaagtaaaatacacagatttgagttcaattctaaaacaagaaaatgtaggcattgtcattataggtgagggcattatacgtaaatccggtagaaaaacattaacaatgggagataacgttatgctcatggatagtttgaactgcgcgttaaatagagagaatgtaaagattagaagaggaaagaggttatcatgaatgattttattgaacttaacatttatgattttgacaataattttattttatacatgcaaatatatcgttaataaatatatcagaatgattgcaattctattatttactgtttgtttaagtctcgcaatcacattaggatttggatttaattttatcgagtatatattaacaatatttttaataattatatttatcgaattaatagaactcgatatttatttaaaacgtaattagccattagactttttattaatgcttacatcgaggagatacatcatgaaagacttgctaattgaatataggaaaacgagactttgcgtactcaataaaataaaatcacttgaatataaagtagatgaagaggataaattaagtatttacaaagatatattaaaagacattgattatacaattgaatggttaacatgtggacacgaaccaggcaattataacgcaatagatagaagtcaatgctatttagtagataatgatgtgatcaataaggcttttagtgaatcaatgtataaaaagaattcagatattgaatacaaagatataattaatgatgttaataataaagtgagctacgcactgatgaagttaacacctaaagaactagagtgttttattatggtcaaatgtgaggggcttacttataaagaatctgcttgtttattaaatttgaaaataggtagtgtgcaaaactatattaaaagagctgaaattaaaataaaaaatgaacttgaaacaaatttatttatatagtgattttttgtcttatgtttgatacatatgtagaagattaattaatctttgttttggtctcctccaattttattgcctatctgagctatgtcttagataggctttttaaatttaattttaaagcaattagcgtaatggtgtgtgataatagttggctagaatagaactttatgaaaagttggatatagtaaataaattaggtttagtagaaggttggaagcgcgatggtttaacagatgagcaaattgctagaaatttaggtgtttccaaacatactttaattaaatggaaaaagaatataccagactttctagacgccataaaaaagggcaaagaggtatcagattatgaattagagaatgcacttcataaaagagcggttggctattattacgaagaagaaacagttactaataaaggcgaagtagtaaaaatcaagaaatatgaacatgctaatcctacatcactaatatttgctctcaaaaatagattaccccataaatatagagataaggttgaacaagaaattacaaatcgcaatatcgaaataaacataggtgactacgttgacgacgattaagattaatattaaggaaccaaataaggtatttaataaaaatatatttgaaattatcaatgattactcacattttactgaagttcattatggtggtggatccagtggtaagtcacatggagttgtacaaaaagtagtattaaaagcattaaaaaaatggaaatatcctaggaaagtattatggcttagaaaagtacaagcaactattactgatagcttatttgaagatgtgagaagttgtttgattttcttcaaaatatgggacttatgcaaatggaataaaaccgacaataaagtagtactaccaaatggcgctacttttttatttaaaggtttagataatcctgagaaaataaagtccattaaagctgtttcagatattgtgatggaagaagcatctgaatttacattagatgattatacacaattaacattacgtttaagggaacgtaaacatgagagtaaacaaatatttttgatgtttaaccctgtttctaaattaaattgggtttataaatacttttttgcaaatggtgtgcaaatggagggggtcttgattaggcaatcaagttataaggataataaatttttggacaaaatgactaagaataatctagaagaattagcgaacagaaatccagcctattacaaaatatatgcgttaggagagttcgctacattagataagttagtttttccaaaatatgaaaaacgaatcattaatactgataaaattaggcacttaccatcttattttggtttagattttgggtacattaatgatcctagtgcattgatacatttgaaaattgatattgaaaataagaagctctatattatttcagaatatgtgaaaaaaggaatgttgaacgatgaaatagctaaacttattaaaaatttaggatttagtaaagaagtgataagtgctgattcagctgaacaaaaaagtatagctgagattagaaagcatggtataggaagaattaaacctgcaatcaaaggtaaagatagcattatggccggaattcaatttattagtcaatttgaaattatagttgatgaacgatgttttaaaactattgaagaattagataactatacatggaaaaaagataaaaataccggcgaatactataacgaacctgtagatacatataatcattgcatagatgcgattcgctattctgtatgtaatttaatttttaaagataagaaaactgaaaataaaatagatgatttaacaaggattagaaacatgttctaaggaagtgaactgatgacgatttacacccaagaaattaacaacacaaagttctctaaaacagcaaataatgattttttaatcagtaatgtagaacagttattaaaagaagaagtattacttagtttgataagtaagcataaaactgaacaagtaccaagattagaaatgttagaagattattatttgaataggaatacagatattttaactgataaccgaagaataaatgattatagtgataaagctgaccatagagcagtacataattatgctaagtatgtcacacgctttatagtcggttatttaactcgtaatcctataacaattacacataaagacgaaatcacaaatgaaaaattagttgaccttaataaaatcaatgatgcagatgctacaaatagtgatttagctttaaatctatctatttatggtcgagcgtatgaaattgtttatagagatactgatgataaagatacattcaaattattagatagtaaaagtacatttgttgtatatgacacttcactagataaaaatatgatagcaggtgttagatactttaatgttaaagattttgacaatacaccaatacagaaaattgaaatatatacaacaaataaaatttattacatcgaagtaagaggcggttctttcaattctatcgatgaaatacctcattactataatgatgtgccaatcattgaatatttaaacgatcaatttaaacaaggtgactttgaaaatgtcatttctttaattgatttgtatgatcaagcacaatcagatactgctaattatatgaccgatttaaatgatgccatgttagctatcgttggaaatattgaaatagatggtgatgaagctaagaagtttcgacaagctaatatggttcatgtcaaaccaagtatcaatgtcaatggttcagaaggtaatgcagatgttaagtacatttataaacaatatgatgttaatggctcagaagcatataaaactagattacaaaaagatattcacaaatatacgaatacgcctgatttaagtgatgagaatttcagtggagttcaatctggtgaatcaatgaaatataaattgtttggtttagagcaagtgagagctattaaagaacgtctgtttaaaaaaggtttaatgaaacgttataaactattattccatattcttaatttaactggtgtacataagtatgattattcaaccattgatattacttttactcctaatttacctaagtctttaaatgaatcaattgaagcttttaattcattaaatggtggagtatctgaacaaaccagattgaaattgctaccaattattgataatccatttgaagaaatcaagaaaatggaagatgaacagaataaggtaaaaaaaattagtgataattcatcatttaaggcaccatttagccacgaaaatgaaatgactgatataaatgtcagataatttaaaatattggctagaacgtgctaaaaacgtcatggacgctgaatctttagttgatgcacaagcaataattgaaattgaacgtatcattctattgatgtacgctgaaattacaaaagaattattagccttttatgcaaaatatgccaaagatactggactgaatattcaagaagttaagaaaatggctgattcatttgatgtactagcatttagtaacaaagcgaaacaatttgttgagcgtaaagatttcagtgaagaggcgaatcaatcgctcaaacaatacaacttaacgatgaaaatctctagagaaaaactgttaaagcagcagctagatttgattgtgaaagatactagtttaaaccttcaaaataaaattgaggataagttaagtgacgcagttaatagagaagtaaagagacaagcacatattctaggtgaacatgttcaaattgatgacactgaagtgaaagcagttgttaatagtaatttcaaaggtgctaaatggtctactagattatggaatgatatggaacttgttcaaaaggaagttgagagggtaacaagtcatgtcgttattcgaggtcgacatcctaatgaatttgtttctgagtttaaaaagcaaaccaattctacttcttataacgccagtagattgttagtaaccgaatcagcacgtgtacaaacagaatcacaaaagatagcttatcttaaagatttaggcgaagatggcgaatataaatatgttgcaaaaatagatagtaaaacatctaaattatgtcattcacttaacggaaaaatatttaaagttaaagatatgataccaggtgtgaatgcgccacctatgcatccttggtgtagaagtaccacagtgccacatgtcggcaattggcgagacaagttctttaaagagcgtgaaggtaaatatcaagtagaagatgacacaaccaaagatgaattacaacaagctaaagtattaggaaagaaaatatatattactgatcaagcaattgataaagtcagatatgttgatattccaacacataccaaagaagaaaatcaatttatacaagaacaacataaagccttgcttaaagatgccaaagaaaacaatgatagcaatgaagtagcttatttattaaaagatggtaaagttacaaaagtatatggtgatcaagatagtgtatcctttgcaccaggggaaaaagcaaccgaattattatttaacagtaaaccaaattcaattgttatgttacataaccatcctggacaatcaggattttcattgaatgatttagcagtttttactattaataattctattaagactatgacaattgtaactaataaaggacgtattaaatttataagtaagacagaacgttttaaagaaaaagtaatgaaaaaaatgatagcaaacttattaatagaaaaatctctagatgtaattagtacaaaagatattgaaaagttattaaaagagttatacaataacgataatataatatatagaaataggtgattaaaaggtgacaatgatgttagacggtaagttatctaaaaaagaattgctcaggttgttaactgaaaaaaacgatgaaaaaaataagggaaaagagaaacaatctaaatagcatcctttctacacaaaaatatagaaagtggtgctatttttatatgcttttttaactatttactgaaatagcagaatcacaaaagatagcttatcttaaagatttaggcgaagatggcgaatataaatatgttgcaaaaatagatagtaaaacatctaaattatgtcattcacttaacggaaaaatatttaaagttaaagatatgataccaggtgtgaatgcgccacctatgcatccttggtgtagaagtaccacagtgccacatgtcggcaattggcgagacaagttctttaaagagcgtgaaggtaaatatcaagtagaagatgacacaaccaaagatgaattacaacaagctaaagtattaggaaagaaaatatatattactgatcaagcaattgataaagtcagatatgttgatattccaacacataccaaagaagaaaatcaatttatacaagaacaacataaagccttgcttaaagatgccaaagaaaacaatgatagcaatgaagtagcttatttattaaaagatggtaaagttacaaaagtatatggtgatcaagatagtgtatcttttgcaccaggggaaaaagcaacagaattgttatttaacagtaaacctaatacaattattatgttacataatcatcctgggcagtctagtttttctcttacagacttgtatttatttatatttaataattctattaaaacactgacaattgttacaaataaaggtcaaacaaagtacttaactaagacaaaagaatattgcaaatcaacttgtattgattgtattaaaaaatataataaaaataagaatataaaaaattcaatcataaggatattgatatgattctaaagagattatataatagtggtaacataatatataaagttaggtgattaaaatgtattttgcacagttagatggtgaaataactaataaacagtcacaagaattattggataaagaatacaagaaagcaatagaattagaaaataagaataaagaacaaaaattagaaaaatagcatcctttctacacagataaagagaaagtggtgctatttttatacatttttttaaccttccaatgtgaaggttattttttattgtccaaaacgtgctgatgacattttaaaagcaagtatggaatatcagtcgacagactataaacggaggtatatctcatggaaaaaaatgaaagtaatattaccgatgtaactcagaacgaagagcaactagacaacagtgatgaacaatcacaacggaatgagaaaacattttctcaagaggaagtatcacaattgattaaagagcgtatagctagagaacgcaaaaaatcagatgaacgtattaaagatgccaaagaaaacaataatagcaatgaagtaggttatttattaaaagatggtaaagttataaaagtatatggcgatcaagataatgtatcttttgtgccaggggaaaaagcaaccgaattgttacttgacagtaaaccgaattcaattgttatgttacataaccatcctggacagtcaggattttcattgaatgacttagagatgtttattgaaaataaatctatccgaacattgactattgttactaactatactgtagtaaaatatataagtaaaactccattatataatcagtctcaagtttataaaataatgaaagatataaaacaatctataactataagaaataatgaagcgatagttgataatattctaaagtaactttataataaaagaaatataaaacgaagtacaaataggagtaatacattatgtcaattcaacatttagatggttacatttctatagaagatttttttaagcatatggaagaattatcgaagaaagaagaattagaaaaagagattaatcaatcaaagtctaaatatcaatagcatcctttctagacagataaagagaaagtggtgctattttttgtgcttttttaacaactaaggatacaagacacttaccttcaacaatatcctcatctaaacctatcgatttcctaagctcaattttaaacacaaagtttatttgtaaagatgcacacctataaaaatcttaatcatcgaaaagtcacaaacatctccatattaaaaacttaaatagtgcatttcatttaaactaaacatagatattcttacaaatatatacttagtaattcgattgttaatacatcactttcataaaataactataaccatcataatacttctcaaatctcgtcaaattaaagtaaatacattacaaattaacatttttaatatataaaataaaacaagatactcaataatctgtagtaccttgttttggaataatgtaattttatatcatcaacggctacaaatgagcagtttcatatataaataaacacaactactcaactgatcttgattaattaataaatgatttgccagatgacatataacagcattattaaattaattctaatagtttatttaaattttcttcggttgtcgcccaactggttgcgaatctaacaacacgatgttgatcatcgtatttttcccaaacagcaaatttaactttttgttctaactctgctattttctcgttacttaaaataaaaaattgttgattggttggagaatcaaagtaaagacgatagcctttatttataaacccgtctttcatcttatttgccatttcgatagcatgtctgcttatattaaaatataaattatccgtaaataattctaaaaattgtatgcctgttaaccgtccttttgctaaaagtgcaccgtgatgtttgattcgagtggtaaattgtttcggttcattattctttgtaaaaacaattgcttctccgcataatgcacctatcttcgtaccacctatataaaatacatcacaatatttagcgatgtctttaatagtcatatctgattgatcactcatcaatccataccctaatcgtgcaccatccataaataatggaagttgatattgcttacatactttgcataactcttccaattctgatttagagtataaagtgccatattctgtaggatgagaaatatataccattcctgggaataccatatggtcctttttaaaatcacttttaaatgtctccatgtaagtttcaacatctgaagcacttacttttccttccttagagggtatagtaattactttatgtccactatattcaattgcaccgccctcatgcacagcaacatgaccagtgtctgctgaaatgaccccttcgtaactttctaacattgaattaataacaacctgattggtttgtgttccacctactaaaaaacgaattgtagcatttggacagtcaattgtatctttaatcttctcaattgcctgagctgtgaattgatcaaagccatatcccgaagcttgtacaagatttgtatctactaatcgttttaatactttttcatgagcaccttctaaataatcattttcgaatgaaatcactacatttccccctaaaactaatatcaacattttaataagataaaccaatttcaaaactagttcgatatttaaaatgtattatgaatggttaaagtttgtatcgcgttatcgcgaagttgaataaatatattatacatcaaacaatacattatgaaaattaattaattttttatcataattactttgcgtgccgaaacacatatattaatgattgaattttactgttaaaagttctatgatttaggaaatagagaaaagaggggatttaaatggaacaaattaaacttaaaacttttacagctgagactttagaattattagaatcaaatatcaacgaatttttaggctctgaagaagctgcaaatttgaaattagtaaatattacaataaaagaaattgaggaaagaacatttccaaataatgaagaagaatttaatgcaatattaactctatctgtaaataaataatctggaacgaaaggtacaaaaggtttttgtgcctttctttataggagaaataaactatgcaattttcattttcaaatgatttaggaacactttttaccattattttagcaattgcctttatcattaatttggttctagcgtttattattatttttttagaaagaaatagacgtacagccagttcaacatgggcgtggttatttgtactttttgtattaccattaattggttttatcctttatctattttttggaagaacggtttctgcgcgtaaactaaataaaaataatgggaacgtgttaacagattttgatgcgcttttaaagcagcaaattgaaagctttgataaaggtaattatggtacagataataaacaagttcaaaagcaccatgatttggtacgtatgttgttaatggatcaagatggctttttaactgaaaataataaaattgatcattttattgatggaaatgatttatatgatcaagttttacaagatattaaaaatgctaaagaatacatccatttagagtattatacattcgctctagatggcttaggccaaagaattttaaaagcgttagaagagaaattgaaacaaggtctagaagtgaaaattttatatgatgacgttggttcaaagaaagttaagatggctaattttgatcattttaaatcgttaggtggagaagttgaagcattttttgcttctaaattaccgttattgaatttcagaatgaataatagaaatcatagaaaaatcatcgtaatcgatggtcaactaggttatgtcggaggatttaacattggtgatgaatatctaggtttaggaaaattagggtattggagagatacgcatttacgtatacaaggggatgcggttgatgcactgcagttgcgatttattttagactggaattcgcaagcacatcgacctcaatttgaatatgatgaaaaatattttcctaaaaagaataaatcattcggtaatgcgccaatccagattgctgcaagtggtcccgccagtgactggcatcaaattgaatatggttatacaaaaatgattatgagcgctaagaagtcggtatatttgcaatcgccttatttcattccggataactcatatgtaaatgccattaaaattgcagctaaatcaggggtagatgttcatctaatgattccatgtaagccagatcatcctttagtttattgggcgacattttcaaatgcttctgacttattatccagtggtgttaaaatttatacgtatgaaaatggatttattcattctaaaatgtgtttaattgatgatgaaatcgtatcagtgggcacagcaaatatggactttagaagttttgaattaaattttgaggtaaatgcctttgtatatgatgaaaatcttgctaaagatttaagagcggcttatgaacatgatattacaaaatcaaaacaacttactgaagaatcttatgctaatagaccattgtctgttaagtttaaagaatcgttagctaaattagtttcgccaattttataaagaataatttcaagtctcattttaatgaggctttttttatttctataattaattactataataatattatgtgaactattgaagtgacaaatgtcattttgaaccaatgacaaagtatcctattttaaatcgaataaatttactaatcttaaattaataaaatattaagaggtggttcatttgattcaaatatctaatattaataaatcatttaagaaaaagcgtgttttaaaaaacatttcatttgatattgaaaaaggtacatgtatcgcattaatcggaaaaaatggtgctggaaaatcaacattagttgatattttaagcaataaaataattgctgatgatggcgtgattttggataaagacaaattattgcaaagtgaaaatcgcagtataatgtttcaaaaaacgatgttttcagatcaattgaaggtaattgaaattatcaaattatatcaatcattttatgaaaatccattaacattggacgtaataatagaactaacaaagtttaattctaatcaattgaatcaatttgcaaataaattatctggaggtcaacaacgattacttgattttgtaatatctttaataggacaaccacagcttattttgttagatgaaccaacgtcaaatatggatattgaaatgagagaatatttttggtcaataatagctaagttaaaagaagaaaatcggacgattctttatacatcgcactatatagaagaagtagagcgcatgtccgacaaaattattttgatagaaaatggagaaatcaaactaaatgatgatacgtcacatattaaagtaaatcagcaatctgagattaccctatcgggtgagtatctatcaaagttaaaacaagaagcaaatgaattaaaaatactaaagaatcataatggtacgattaaaattcttacttcaaatgtaaatgatactattttatatctactgcaacatcatattaatttaaatgatattgaaatacataaagtatctattatcgatacttactttaacaataaaaagcaaaggggttctatatatggtcctaaattacttgaaatttgagtttaaagttttgtttcgtaaaaaaactgctttatttttatcaatatttttcccagcaatattttatatcttgtttacttcaatattagatttaccaagcgatgtcaaacttagattctataaagaatacatgtatagtatgacggtttatagtttgataagttttagtttaatggcgtttccaatagatattattaatgaaaaacaaaatggatggcgtcaaaaattaatggcgacaccattaacacctgctagttactatatttctaaaatagttaaaacaatggcacaatttgcaattgcaattatagtgatttttatgataggacatttttataaaggtgttacactaagtataagtcaatggatagaatcaggtgtattgttatggctaggtgcatcattattgataacttttggtgtattattttcgttgattaatgatattcagaaagcaagtgctttaggtaatatcgtgacaatcggattagcggtgctgggcggattatggtttccagttaatacatttccaaattggcttcaacatattgctcatgttttaccaagttatcatttgcgcaagttaggtttagacattgtttcaaatcatcatattgatttaagatcatttggcatactaattttatatgctgtaggtagtttaatagtggtatattgtattagacattttaaaagggcggaataaaatatgaaatttttaaaagatacttcaattgctgaaatatcgtctatactttatctgatttttcctattgccggtatattttttaatgaagtgtatggtcccaaatggttgtatattatatcagtcattgtcttttcgttgtcgtatcttatattagttatagtaaataaaagacttaatacattaatgttttacattttgttgattattcattattttattatttgttattttgttttcagtgtacatccaatgctaagtttgtttttcttttatagtgcttttgccattccatttacttttaaaaataatgttaaaaaaatggcaactaatcttttcatattaacgatgattatatgtttaacaattacttacttagtacataacgactattttgttgcaatgacgatttattatgttgttattttgttaatcgtgtttgataatttaaaaaaagtgaaagatcgtgaatataaaaaagaaatagaagaaaaaaatcgatatattaatacgttaataactgaacaagagcgtcatagaataggtcaagatttacatgatacgcttggtcatgtgtttgcaagtttatcattaaaatcagaattagcttataaaattattgattctgatactgaaaatgcaaaagctgaattgttagcgattaataagttgtcgcgggaatcattaaacaaagttcgcgaaattatcgatgatataagattaccatcatttattgaagaaattgagagtatctgtaaaattttaaaagatgctgacattcagtttacgtttgaaaataaagaattggcacaattattgagtcctacaaaacaatccattttagtaatgattgctcgtgaagcgataaacaatgtgattaagcatgcaaatgcttcaaaagttcatggtcaattacgagctatgaatgaacataaattacagttcattatacaggataatggagaaggtattgacagcggctgtgaaataaagagtatttcacaacgagtacaacatttaaatggaacattagaagttgaatcgaataaaggtactaaattaattatcgaaatgcctacagggggaatagcatgatttctataattattgcagaagatcaaaatatgttacgacaggcaatggttcaattaattaaactacatggtgattttgaaattttagccgatgtagataatggtctcgatgcaataaaaattattgaggcacaccatcctgatgtagttattttagatattgaaatgtcaggcatgactggacttgaagttttagcagaaattagaaagaagcatttgaatattaaagtgattattgtaacaacttttaaaaggccggggtattttgaaaaagctgttgcaaatgatgtggatgcatatgttttaaaagaacgttctatagaagaattagtggaaacaatttataaagtgtataacggtaagaaagaatatagtgcttctcttatgacttcatttttcacagataaaaacccattaacaccaaaagaacaaattgtattaagggaaatcggcaatggtttaagtagtaaagaaataagtgaaaaattatttttgacagatggaacagttagaaattatacatctgttataattgataaattatttgcagataatcgttttgatgcttggaaaaaggcgaatgaaaaaggctggatctaaatataatcaaaaaagtattgagtgttttgatttaagagactttgaaagtgagtcaataatcaaaatcttactcaatacttttattttggtactcgcaagttagatttgttaactaattttttcgtttattataaaacgaaacaatcaggtaaacgataaagcctgcaaagatacccaataaaatagatagtactgccgtcactattaatggtaatttgaaaaatatttgtaggaaaataccaatgataattgcgataattactgcaattaatgtgactgtattttcatttgaaatgttcattcattttcactccttaacaataacattatatcatgctatagctttccaaaatattgaaatatgtagatatggctattgacgatatttcttaacttttatatgattaatcggaatgaaaaaagagaagtaggtggcaaaatgaagtcaaataaatcgcttgctatgattgtggtagccatcattattgtaggtgtattagcatttcaatttatgaatcatacgggtccttttaaaaagggaacaaatcatgaaactgtacaagatttaaatggtaaagataaagtacatgttcaaagagttgtagatggtgatacatttattgcaaatcaaaatggtaaagaaattaaagttaggcttataggggttgatacgccagaaacggtgaaaccgaatacgcctgtacaaccatttggcaaagaagcatcaaattatagtaagaagacattaacaaatcaagatgtttatttagaatatgataaagaaaaacaagatcgctatggtagaacattggcgtatgtatggataagtaaagatcgtatgtacaataaggaattagtggaaaagggacttgctagagagaagtatttttcaccaaatggcaaatatagaaatgtatttatagaagcacaaaataaagctaaacaacagaaattaaatatttggagtaaataattaaataggtgattatatatattaaagtaaaatatacttgaagcatcgatttattattatcataaatttatatatagaaataatttaaaggcataataaccatagtgcgtatcgagcgtaatggattattatgcctttgattttacttgaatatagctgtgatttgatcaacctgttctttatttaaagggtgtttagatagctctatggcttcgctaataatacgtcgtaacgaagattttgttgaaactgtatcaacatatttatctctttcttcagagccttgaatgatattaactgtaccatcactaaagtaaataacaccggtactttggactttaaagttaaagttttgttcaatatgatcctttaatgctttagcattatttgctgctaattgatacggatcataatcataaaaatcataaataacacgatttggttgaactgtttctgtaaaagtatagatagactttcttgatgaattaaactgatcatgatattgctggctaatgtaatgaccgacaactttttcaatattactattgcttatttctgtatcatgctcatcaggtacatcaaagtgataaaatgttttttcaccccagctttttacatcaacgtttattaaaccgatatctgaaacaatgataaaatcaaatgaacgtgcatactcgaaaaacggatgtttagtagctaaattgcttgtaacgataatatcgtaatattttaatttaccattttcgagatagctatctaaaatcttgcgtaattctcttttagcatttttgtatgcatggtggccaacatcattattagaactcagcatttgacttcttaattcagcattttctgcacttaatgctttgttctttttaataagttgctttcttgcataaacttcggtatctattttactattactatacctttgatttaaaactaatataccaattaatgctacaatgataatgataagtacaacataaaaagacattttttcaccaatcctttttgacttctttaactttgtatacaataataattaataaagattaattgttattcaatttcccacatttttattagttgattttagttcatcattgttataatcaaattataaactgacagatattgatgttcaatgaatatgacgtgaaagattcgtgaattcaagtttatgtcaaatttatgttataacggtcatttaaatgacagaattaggtcactcatagtattttgaagattgaattcattaattttaaaatgtataatgatatttgtgaaagcgcttgcttaggaggtgtatttgagagtgaatgaaatgaatgctaaagaacaattagtggacaatttaatgaaaacatcatcgcaattatttaaatttcacggtgaagttgccatgcagcttttcttaaatgatgaattaaaattaccttctattgttgaaatatgcgtggaacgtaagcgtttaagtgatattgtgaaagttattccgcaatcatatgcgttactatacatagataagcaagatcaagcaatagctaaagaagatttatcactttcaaaaattgcaaaagtttatgtgcaatatgatgatacaacaataatgagtattttcgtttatgatgttgtaaatgatgaatggatttttagattggatccgaatatacgtatacctaagagtaacatttacttccatagtttaaattgggatgtggattatattaaaccggagattgttctaatgtatgatctaatgcaacaccatcagtatcatcattattccaattataaacgtgtcatagatgcattaagctactatcaattttttattttaaaatttgtagtaggtgagcaacgtattaaggatgcaatccagagaacaataaataattaagaaaaagcaattcataacgcagttgaatacatgtgttacgaattgcttttatattagtttttatcacacaagttttttaatgcaaccccgtgatagcaaaactcatatgtagataatacagctttttcagcatcatctacatgaattccaaacatcatcgagatttccgaagcaccttggttaatcatttttaagttaatttttgattcagctaaggcatgtgtaattttatttgcagtaccgatgactttattcattccttcaccgacaatcattaaaattgctaaatcatgctcaatacttaactcatcaacatcacatttttgacgaatttcatttaatacttttgtttctttattttgaatttgttttgaacgcataacgatactgatagtatcaatacctgaaggcatatgatcaaatgaaatattattatcctctaagacacctaatatctttctagtaaagccgacttgtctattcattaaatactttttgatattaatgacagtaaaatctttatcacaacttataccgctaatcacatttttcgcatttatttctctatcatgcactataaatgtacccttatcttgagggcggttcgtatttttaatcaccacagggatgcgatctttataaagtggttgtaaggcttcatcatggaaaacactaaaaccagcataagataattcacgcatttctcgataagtgatttcttcgattaattcaggatctttgatgatatttggattagctttataaataccagacacatcggtgaaattttcataaattgtggctctaacaccacttgatatgatggcgccagttatatctgatccaccacgtggaaatgtaactatatatccttcatgagatacgccaaaaaatcctgggataattagtttttcatcataatctcttaattttttaatttcagagtaagcactatctaatatttgtgcttcttgtgggacgtcagtaacaaaaatacccgcttccttcggtgatatatattttgttggtataccttgactattattatataaagctatcaattgcgcattaaaatcttcaccacaagaaagtaatgcatctaatagtctcttcggttcattttttaattgattaatataatgttccaaagtcacatctatcgtccgtaaaatactttcatccatttgcaattcttttacaatatcatcataacgctgaataatttctctttttttatcatgataatcaagatgattaatgaccttttcatataatctgattaacaaatcagttgttttaatatcattatcatgtcttttacctggagcagaaacgataacaatctttcgctctggatcagaattaacaatatttaaaacctttttaatttgagtagcattggagacggagctaccaccgaatttggaaactttcatagtgcatgccaacctttctaaaaaatcagaaaattgtattcagttttgtaagtaagaatgatattatgtatttatattttgaatattacgaactttacaaaaataaagaataattctatactatactatcatctagtgtttttcaataatacatttgtttttctcaaaagcacaaacggaggtacataaaatgaaaaaattaaatatagcattattaggattaggtactgtcggatctggtgttgttaaaatcatcgaagagaaccgacagcaaattcaagatacattaaataaagatattgtcataaagcatattcttgttcgagataaatctaaaaagagaccgctaaatattagccaatatcatttaactgaagatgttaatgaaattttaaatgatgattcattagatattatcgttgaagtcatgggaggaattgaaccaactgtagattggttaagaacagcacttaaaaataaaaaacatgttattaccgcaaataaagatttattagcagtacatcttaaacttttagaagatttagcagaagaaaatggtgtagctttaaagtttgaagcgagtgtagcaggtggtattccgatcgtaaatgccataaataatggtttgaatgcgaataatatttcaaaatttatgggaattttaaatggtacctctaattttattttatctaaaatgaccaaagagcaaacgacatttgaggaagcacttgctgaagcgaaaagacttggttttgctgaagcggatccaactgatgatgtagaaggggtagatgcagcgcgtaaagttgtcattacatcatatttatcatttaaccaagtcattaaattaaacgacgttaaacgaagaggaattagtggtgtaactttaactgatattaatgtagccgatcaactggggtataaaattaaattgattggtaagggaatatatgaaaatggcaaagttaatgcatcagtagaaccaacgttaattgataaaaagcatcaattagcagctgtagaggatgaatataacgcgatttatgtcattggtgatgccgttggtgacacgatgttttatggaaaaggagcaggcagtttagcaacaggtagtgccgttgtcagtgatttattgaatgtagcattattctttgaatcagatttacacacattgccaccacattttgaattaaagacagataaaacaagggaaatgatggattctgatgcagaaattaatattaaagaaaaatccaatttctttgtagtagtaaatcaggtcaaaggttcatttgaaaattttgaaaatgagttaaaggcaatattaccattccaccgatcattaagagttgcaaattacgataatcaagcatatgccgctgttatagttggattggaatcatcaccggaagaattaatcactaagcatggatacgaagttgacaaagtatacccagtagaaggagtttaattataatgagaagatggcaaggattagtagaagagtttaaagcacatttaccagtaaatgaaaatacaccaaaattaacattgaatgagggaaatacaccactcattcattgtgaaaatatgtctgaaatactaggtatagatttatatgtgaagtatgaaggtgccaatccgacaggttcatttaaagatcgcggtatggtaatggctgtgacaaaagcaaaagagcaaggtaagaaaattgtaatatgcgcttcgactggaaatacatcagcgtctgcagcagcatatgcagcgagagcaggtttaaaagctatcgtcgtaataccagaaggtaaaattgcattaggtaaattgtcgcaagcagtaatgtatggtgcagaaattgtttctattgaaggaaactttgatgaagctttagaaattgtaaaagaaattgcaaaaagtggcgaaatcgagcttgtaaactctgtcaatccatttagaatcgaagggcaaaagacaggctcatttgaaattgtgcaacaattagacggtgaagcacctgatattttagcgattcctgtaggtaatgcaggtaatattactgcatattggaaaggctttaaagaatatcatgaagctaaaggatcacaattgccgaaaatgtttggcttccaagctgaaggcgcatcaccaattgttcaaaataaagtcattaaaaatcctgaaacgattgcaactgctattcgaattggtaatcctgctagttgggataaagcgactaatgctcttaaagaatcaaatggattaatagatagtgttactgatgatgaaattctagaagcatatcagttaatgacaactaaagaaggtgtctttagtgaaccagcaagtaatgcttctattgcaggtttaattaaattgcatagacaaggtaaattacctcaaggtaaaaaagtagttgcgattttaactggtaatggattaaaagatcctgatactgctatttcactactagataatccgataaagccattgccaaatgataaagatagcattatcgattatattaaaggagctttataacatgtcgaatgttttggagttaacaattcctgcatcaacagccaaccttggagttggctttgattctataggtatggctttagataaatttttgcatctgtctgtaaaggaaacatcagggataaaatgggaatatattttccatgatgatgcatcgaagcaattgcctactgacgaaacaaactttatttatcatgtggcacaacaagttgctgctaaatatagtgttgacttgcctaatttatgtatcgaaatgagaagtgatattccattggcaagaggattaggttcgtcagcttctgctttagtaggagctatatatatcgcaaattattttggtgatatccaactgtctaaacatgaggtattacaattagcgactgaaatcgaaggacatcctgataatgttgcgccgaccatttatggtggtttaatcgctggatattataatgatgtcacgaaagaaacgtcagttgcacatatcgacataccagacgtggatgtgattgtaacgataccaacttatgaactaaaaacagaagcatcaagacgtgctttaccacaaaagttaactcatagtgaagcggttaaaagtagtgcaattagtaatacaatgatttgtgcattagcacagcacaattatgaattagcaggtaagctcatgcaacaagatggctttcatgaaccgtatcgtcagcatttaattgctgaatttgatgaagtgaaaacaattgctagtcaacataatgcctatgcaactgtaattagtggtgctggaccaactattttaatatttagtcgcaaagaaaatagtggcgaattagttcgcgctttaaatagaaatgtagttacatgtcattctgaattagtggatattaatgttagtggtgttaaagaacgaattgtataccaatagacactttatattgtaaaatagtattgaatgtgaaatagagaggagatttaatgcgatatgacaaattataaagttgtcgttttagacatggatgacacattgctaaattcagataatgtgatatcagaagaaactgcaaattatttaacagcaattcaagatgaaggatattatgttgttttagcatctggtagacctactgaaggtatgattccaactgctagagatttaaaattacctgtacatcatagctttattattagttataacggcagtaaaacgattaacatgactaatgaagaagtagaagtaagtaaatcgattggtaagcaggatttcgatgaaattgtagattattgtcgagatagaggatttttcgttcttacatatcatgatggtcaaattatttacgacagcgaacatgaatatatgaatattgaagcggaattaactggtttaccgatgaaacgtgttgatgatatcaaagcatatattcaagataatgttcctaaggtcatgggtgtagattatgtatcgaatattacagaagctagaattgatttgaatggtgtgttcaacgataatgtagatgctacgacaagtaagccattcttcttagaatttatggccaaagatgtttcaaaaggaaatgcaattaaagcgttatgtcaaaaattgggatattcggtggatcaagtcattgcttttggtgatagtatgaatgataaatcaatgtttgaagttgcaggtctagctattgctatggggaatgcatcagatgaacttaagcaatatgcagatgaaattacgttggaccataatgaaaatggtattccacatgcgctcaaaaaattgttataaattttaaaataagccttaacacatgatatttgaataagatatcttgtgttaaggctttttattcatgtgaaaatgacttcagttatactatgaagaatttgaaatacatattttagattagtaatgatatcaaacgaatagagtagatgtatatttttaaaataaatcaagtattaattagtcacggaaggtagataaataaatttgaatcattctgaataataacgaatgtattaaaaatgcagtgacaatctaacattaattgttaaaatcactgcaagcatcttgattttagttagctgtttgtgtccagtcatgcttccctctgaaacgttttacatgagcatatatttggtcagcagtataatctaaatttgtataaactgtaatactgaacgctgattggttttcagcaaatgattcttcggaaaataattcctttaagtgcgtaaataaatcattcatttgtttatggtttaaaccgggatattcccttaaagttctctttaataattgtccgttcttttcttctaatgcttgaactacaataacaaatctctcatcttgctttagtacatcatcaaataaatttgtttgtccaatcattgaatttcacccctgaaaagttattgttatctatattatacacgatatgcaaaatatctaaaataaagaatggtaacatggtcataataaaatataaacagtctactagttaatacactttatactagaaaaagatattaaagtatatctactttacaccattaaaaaagcggcaaatgctatagataatctaaagcatctgccatgtgggaatttatttatttttgattgtcataatcgtgtggttttaaattaattgtttctagctttacaaattttgttttgtgaatgattttatgaataaagtaaatcaacgctagaatgattaaaggtaaaaagtttttaaaagcatttaaccattgatcttttaaaatatattcaactgaaccaccaaatagcaagaataatagcgtagcgatgacaatgattggtcctaatggataaaaaggtgctttatatggtaggaccttattaggatcttgaccttgttttttaatagcttgtcgcaatcgtatttgtgaccaaatgcttgatccccaaacaactataatcattgaaccaataatttcaagtaaattaaaaacggcatttgaattaaagtttgcataaataataacaataacaacgactgcatatgtagttaataatgctcttaatggtaactttgttgtcttgtttaatttacttaaaaatttaggtgcttttttgtctgaacttaaggaatacaacattctgcctgttgtatacacacctgaatttgcagcggataataatgaagttaatataactgcattgattactgatgctgcaaaggctatgcctactctatcgaatacaattgtaaatggactttgacttattgaactacttgctcttaataatgatggatctgtgtacggaataattgcaccaatgactgcaattgataatacatagaataaaagtatacgccaaaacacttgtttaattgctttaggcatagactttttaggatcatctgattcgccagcagttactgctactacttcagtaccaccaactgagaatccagcgactaataatacgcctaggaaaccagagataccaccaacaaacggtgcttggccttttgtatagttttcaaatccatatgcatgaccacctaagataccgaaaatcattaaaaagccaaaaataacgaatacgatgattgttaacactttaattaatgataaccaaaactcagtttctccaaatgattttacagaaaaaatgtttaataatagtaaaattgtaataaagattaagctccaagtaatggggtggaaaaatttaaatgtgtcccagaaataaagcacatttgacgctactatgacatcaacacttgtaactaatgaccacaatgcccaatacaaccatcccatggtaaagcctagagatgagtcaataaagcgtgttgaataagagctgaatgaacctgatactggataaaatgttgccaactctccaattgatgccattaagaaatatagcatgacaccaataacaagataagcgagtatagcgcctccaggaccagcttgagaaatgatattaccagtagctacaaatagaccagtcccaattgcaccacctatagcaatcatggaaatgtgtcttgagttaagactacggttcattttattatcttccatatttagtctcccatctatttaaatatacccattattgtaagctttttaagtgtactattcaataactatttagtactgtaaagcgaaaaaattaaaattttctgattttttaatcatcttgagcatgtttaattgtaattctgatggggttaaattataatatgtattaaattataattattataaattgtggagggatgactatgtcacaacaagacaaaaagttaactggtgtttttgggcatccagtatcagatcgagaaaatagtatgacagcgggacctaggggaccactattaatgcaagatatttactttttagagcaaatgtctcaatttgatagagaagtaataccagaacgtcgaatgcatgccaaaggttctggtgcatttgggacatttactgtaactaaagatataacaaaatatacgaatgctaaaatattctctgaaataggtaagcaaaccgaaatgtttgcccgtttttctactgtagcaggagaacgtggtgctgctgatgcggagcgtgacattcgaggatttgcgttaaagttctacactgaagaaggaaactgggatttagtagggaataacacaccagtattcttctttagagatccaaagttatttgttagtttaaatcgtgcggtgaaacgagatcctagaacaaatatgagagatgcacaaaataactgggatttctggacggggcttccagaagcattgcaccaagtaacgatcttaatgtcagatagagggattcctaaagatttacgtcatatgcatgggttcggttcacacacatactctatgtataatgattctggtgaacgtgtttgggttaaattccattttagaacgcaacaaggtattgaaaacttaactgatgaagaagctgctgaaattatagctacagatcgcgattcatctcaacgcgatttattcgaagccattgaaaaaggtgattatccaaaatggacaatgtatattcaagtaatgactgaggaacaagctaaaaaccataaagataatccatttgatttaacaaaagtatggtatcacgatgagtatcctctaattgaagttggagagtttgaattaaatagaaatccagataattactttatggatgttgaacaagctgcttttgcaccaactaatattattccaggattggatttttctccagacaaaatgctgcaagggcgtttattctcatatggcgatgcgcaaagatatcgattaggagttaatcattggcagattcctgtaaaccaacctaaaggtgttggtattgaaaatctttgtccttttagtagagatggtcaaatgcgtgtagttgacaataaccaaggtggaggaacacattattatccaaataaccatggtaaatttgattctcaacctgaatataaaaagccaccattcccaactgatggatacggctatgaatataatcaacgtcaagatgatgataattattttgaacaaccaggtaaattgtttagattacaatcagaggacgctaaagaaagaattttcacaaatacagcaaatgcaatggaaggcgtaacggatgatgttaaacgacgtcatattcgtcattgttacaaagctgacccagaatatggtaaaggtgttgcaaaagcattaggtattgatataaattctattgatcttgaaactgaaaatgatgaaacatacgaaaactttgaaaaataaatttgatatgtagtttctatattgcgtagttgagcagtttatgatatcataataaatcgtaaagattcctaacaagagagggtgtttaacgtgcgcgtaaacgtaacattagcatgcacagaatgtggcgatcgtaactatatcactactaaaaataaacgtaataatcctgagcgtattgaaatgaaaaaatattgcccaagattaaacaaatatacgttacatcgtgaaactaagtaattcttatcattcaaatacgacgatttgaaaataaagcgggcttacctattatattggggagctcgcttttttatgaaatttctgtaaagagtgattaatgaattgagtttcatcgatagatcaatatatgattgtattagttgttactttattaaaatttgagaatatttatagaaggaaatagattactgattttatgaagtcactttgttagcgaatgcttgaaagagtatttaatatagtagaatttaaaatttcaaagcggaatttaataagtacgaagtaattctggatatgttttataaatgttcgacaatacattttaatgttaaatatgatggtttagaaatgatttaacaaagaaatgaaactttactgttgaattatgtgaggattgtgttattatataaatcgtaataattacgatttgataaaaagtgaggtaactatatatggctaagaaatctaaaatagcaaaagagagaaaaagagaagagttagtaaataaatattacgaattacgtaaagagttaaaagcaaaaggtgattacgaagcgttaagaaaattaccaagagattcatcacctacacgtttaactagaagatgtaaagtaactggaagacctagaggtgtattacgtaaatttgaaatgtctcgtattgcgtttagagaacatgcacacaaaggacaaattccaggtgttaaaaaatcgagttggtaaaatcaaatttcgtactttagcccatttacaatatcaataaaacaatgtacagtatatacgaatgctataaactgaatgttttctcaaattaataaggaaacattcggtttttaatttgcatttaaaaataattagtttttaaaggggctatttaaagtgaaaatatttgattacgaagatattcaattaatacctaataaatgcatagttgaaagtaggtctgaatgtgatacaactatccaatttggtccgaaaaaattcaagctacctgtagttcctgcaaatatgcaaacagttatgaatgagaaattagcgaaatggtttgctgaaaatgattacttttatatcatgcatcgttttgatgaaaaagcaagaataccttttataaaacatatgcaaaattcaggcttatttgcatctatttcagttggtgtaaagaaagcggaatttgattttattgaaaagttagctcaagaaaaattaatccccgaatatattacaatagatattgcgcatggtcactcagattcagtgataaacatgattaaacatataaaaacccatatacctgatagttttgttattgctggtaatgttggtacgccagaaggtgttagagaattagaaaatgctggtgctgatgctaccaaagtcggtataggtccaggtagagtttgtattacaaagattaaaacaggttttggtactggtggttggcagttagcggcattaaacatatgtagtaaagcagctcgtaaacctttgattgccgatggtggtataagaacgcatggcgacatcgctaagtcaattagatttggtgcatcaatggtcatgattggttcattatttgcggcacacgaagaatcacctggtgaaactgtagaacttgatggtaaacagtataaagaatattttggtagtgcatctgaatttcaaaaaggcgaacataaaaatgtagaaggtaaaaaaatgtttgtagagcataagggttcattaatgaataccttaaaagaaatgcaacaagatttacaaagctcaatttcatatgccggtggaaaagacttgaaatcattacgtactgtagattatgttattgttagaaactctattttcaacggtgatagagattaatatttatagtaggtgatgtaaattaaaaaattcatagtaactgttgttgcgtttttatcaattattatcattgcgccaataacagaatttaaaccattcattcatttacaaaatgaagtaaggcaatatattgacattcacatcaataaagaaacaatttctgcggaaaataaattggatacgccgaagaaacaacaatttgcctttaacaatatacaaatgaacatgtcgaagtcagatgttgagaaaacattgaataaaccaaaaagagttacatttaatgaatatggcacgaagtggtatacgtattatgatggtgattacaataattttataatggtaagttacattaaagataaagtaaatgcgttatatacaaatcaaaatatcatcacttcaaaatcaaaaattaaatacaatacaccgaaatcggttgtaaggcaaagattaggcgaaccagaaacagagattgttaaaggtagagtgcgttacgaacaaaataataaagaatatgatgttttccataaaaatcacatttatacgacggtattttatgataagcatcgacgtaataatgtaacagctgttttacaagtaagtgatgctatggaaaatagattaaaagaacaatatggagcaccttcgaaatcgcttgcagatagttttgaactacaaaattttgatttagttaatgctgaaagaaaacaacatcaattatctacattgaagtattctaaacagaattctgaaactgctcgtaagcatagtaaagatatggccaaaaatcattattttgatcatacaaatttaaaaggtcaatcaccatttgatcgattgaaaaaagatggtattacatttaactcagccggagagaatttagcatatggtcaagttagtagtatctatgcacatcaaggattaatgaattctattggtcacagaaaaaatattttaaatgatacgtttaaaatattaggtgttggtgttgattttaatgatgaaaaacaacctttttggacagaaaattatactggttaatgtttttggcatgagattaaagggtaatgtttgtctgtaaggaagtagataaacatgatgacaacagataaaccaaaagatgcggatatacttgaacgcgtcaaagatatacttaataaaaaagaaagaaaaaaataataatggctcgctcctgtaaattattacgggggcgagttttaatttgtgtaacattttgcaggaatctgtaattcaaaatttatattaaagaatgagattatctaacaattcgcaatttctgtttgaactgaatttagattagaataaataaaacctcttgaaaacgaaactttttcaagaggtccaaaatttataaaaatgagggcttaacaattacgataatatataacggtttaaaatattacatttcgcggtacaaaccaattactttcccaattacagcaacattgtcgaggtaaattggctccattgtactattttcaggttgtaatcgataacgatttttttctttatagaagcgtttgacagttgcctcatcttcctcagtcatagcaacaataatgtctccattttctgctatggtttgactgcgaacaattactttgtctccgtctaatataccagcctcaatcatactgtcgcctacgacgtttaatatgaatatgtcgctattgtgtgtcgatgttaagtgttcaggtaatggaaaatattcttcaatattttctactgcggtaataggaacacctgctgtgactttaccaataactggcacatgaatcgtttcttccatattaatattatcatttgtttgatcacttacaatttctatagcgcgtggtttcgttggatctcttcttatatagcctttttcttcaagacgtgaaaggtgaccatgaacagttgaactggatgctaagccaactgcttctccaatttctcgaacactaggcggataacctttcatttgaacaacttgtttaatatagttatatatttcgctttgtcgttttgttaattctctcatatataggcactccctaaattaatttaaatacagtatatcattaattcacaaccaaaacaaacatttgttcgttaaaatattgacacagaacataagttctgataaattactaatacaaacaaatgttctaggagtggaaatgatgttttacaataaatataaaaacgtatcaacatatatcatcatatttttagtttcaagtgcagcctttgcaatattcttgttaagtgcgaacattagtgctcactcggaacaagtgtacgaaatgactgaccatcaaattaagaacaatacgataaataaagaatacgaacataaagaccctacaaacgatagcgaacaaagagatgggaaagtgttcgctttaataaattgatacattgtcacaacgttattttgcctatttttgcgaaatagcgttttttattacttttttgctgatcttaaatttgttatattttgttaaagtataataatgattgaataaacaaattgaaggtaggttttttaattgagtaattctgatttgaatatcgaaagaattaacgagttagctaaaaagaaaaaagaagtaggattaactcaagaagaagcaaaggagcaaacagccttaagaaaagcttatcttgagagttttagaaaagggtttaaacaacaaattgaaaatactaaagtaattgatccagaaggtaatgatgtaacacctgaaaaaattaaagagatacaacaaaaaagagataataaaaattaaaacacaaatctgtaaagaattttctgacattataacttgaaataagtattttacttatctttttattttaaaataagttataatgtatttgataaaattgaagaagggaagatacacaagatgtttaatgaaaaagatcaattagctgttgatacgctacgtgcactaagtatcgacacaatcgaaaaagcgaattctggtcatccaggattacctatgggagctgccccaatggcttacactttgtggacacgtcatctgaattttaatccacaatctaaagattacttcaatagagaccgtttcgtattatctgcagggcatggttcagcactattgtatagcttgttacatgtttctggtagtttagaattagaagaattaaagcaatttagacaatggggttctaaaacaccaggtcatcctgaatacagacatacagatggtgtagaagttactactggaccacttggacaaggttttgctatgtcagttggattagctttagcagaagatcacctagcagggaaatttaataaagaaggatataatgttgtagatcattacacatatgtattagcttctgacggtgatttaatggaaggtatttcgcatgaagcagcttcatttgctggacataataaattaagtaaattagttgttttatacgattcaaatgatatttcattagatggcgaattaaacaaagctttttctgaaaacacaaaagctcgttttgaagcatatggttggaattacttactagttaaagatggtaatgatttagaagaaattgataaagcgattactacagctaaatctcaagaaggaccaacgattattgaagttaaaacaacaatcggatttggttcacctaataaagcaggaactaatggtgttcatggggcacctttaggtgaagatgaaagaaaattaacattcgaaaattacggtttagatcctgaaaaacgttttaatgtttcagaagaagtatacgaaattttccaaaatactatgttaaaacgtgctaatgaagatgaatctcgatggaattcattattagaaaaatatgcagaaacatatcctgaattagcagaagaatttaaattagcgattagtggtaaattgcctaaaaattataaggatgaattaccacgttttgaacttggtcataatggtgcatctcgtgctgattctggtactgttattcaagcaatcagtaaaactgtcccttcattctttggtggatcagcagaccttgctggttcaaacaaatccaatgtaaatgatgcaacagattatagttctgaaacacctgaaggtaaaaatgtgtggtttggtgtacgtgaatttgctatgggtgctgctgtaaatggtatggctgcacatggaggtttacatccatatggtgcaacattcttcgtatttagtgattatttaaaaccagcattacgtttatcatcaattatgggattaaatgcaacgttcatcttcacacatgattcaattgcagtaggtgaagatggtcctactcatgaaccaattgaacaattagctggattaagagctattccaaatatgaatgttatccgtcctgctgatggtaatgaaacaagaatagcatgggaagttgccttagaatctgaatctacacctacttcattagtattgacacgtcaaaacttaccggttttagatgtaccagaagatgtagttgaagaaggcgttcgaaaaggtgcctatacagtttatggctctgaagagacaccagaattcctattattagcttcaggttcagaagttagtcttgcagttgaagctgctaaagatcttgaaaaacaaggtaaatcagtgcgtgttgtttcaatgcctaactggaatgcatttgaacaacaatctgaagaatataaagaatcagttattccatcaagcgtaacaaaacgtgttgcgattgaaatggcttcaccgcttggatggcataaatatgtaggtactgcaggtaaagttattgctattgacggctttggcgcaagtgcacctggcgatctagtagttgaaaaatatggctttacaaaagaaaatatcttaaaccaagttatgagcttataagaataatttataaagcgagtatatttagaagtctaggatgcataatcttaggcttcttttaaagtgttgaaatttagagtatagcactcaaactacatcataagtgataagttttgaaaatatactatttcagattaatctttaaaacctctgttataacagcatgatttttgatattatttttagtatcgatattaaaatacttgaataaactagttcttgaaataatgtgatgaatttagtaaaattcagtaggataaagaaagcgggtgaaacaatggcaacttggttagcaattatttttatagtagctgcattaattttaggtttaattggaggtttccttttagctagaaaatatatgatggactacttgaagaaaaacccaccaatcaacgaagaaatgcttcgtatgatgatgatgcaaatgggtcaaaaaccttctcagaagaaaattaatcaaatgatgacgatgatgaataaaaatatggatcaaaatatgaagagtgcgaaaaagtaaattcgcaattgatagaggctattttccagatatggaaatggcctctttttataatcaaattaataagaataaatatgtttattaaaattaaagttaacaaaatgacgaatagactgagaaatgctataattcattttgtatgatttacagagagtttatttaacgagaaggtgtctgcgtgctctatttaatattttcaatcattgtagctttatttatgggaactatagttatagttattcgtatgaaagctcaaaattatccggtaaatgagaaaaaaatagttttgccaccgttttttatggcgactggtgcattgatgtacgtcgttccatattttaggctaacaggatcggaaatgctagaagcctttataattggtttgcttttttctacagttctaatttggacttctcgatttgaagtcaaaggtacagaaatttatatgaaacgatctaaagcatttccagttattttgatttcattacttgtcattcgtactgtgatgaaaatattcattagtaatgaaatagatcctggagaattaggcggcatgttctttttattagcattctgtatgattgttccttggagagcagcaatgctatataaatacaaaaaactaaagaaaacattaatcaattaattactttcaaaaccacttgtgatcgacttttaaatcagtcaatgagtggttttaattttacttgaaaaggtgaaatgattatattaaaataaaagcgaacaaatgttctatatggaggcagtaatgaaaattatacatacagcagactggcacttagggaaaatattaaatggcaaacagcttttagaagatcaagcgtatattttagatatgttcgtagaaaaaatgaaagaagaagaacctgatatcattgtgatagctggagatttatatgacacaacatatccaagtaaagatgcaatcatgttattagaacaagcgattggaaagctaaatttagaactacgtataccaataattatgattagcggaaatcacgatggtaaagagagattaaactatggggcgagttggtttgaacataaccagttatttataagaacagattttacatcgattaattcaccaatagagataaatggggttaatttttatacactcccttatgctactgtgagcgaaatgaaacactattttgaagatgacaccattgaaacgcatcaacagggaattacgcgctgtattgaaacaatagcaccgacaattgatgaagatgccgtcaatattttaattagtcatctgactgttcaaggtggaaagacatctgattctgaaagaccattaactattggaacggttgaatcagttcagaaaggtgtttttgatatatttgattatgtcctgctaggtcacttgcatcatccatttagtatagaggacgacaaaattaaatatagtggctccttattgcagtattcattttcggaagcgggtcaagctaaagggtatagacgtgtaacaattaacgatggcattattaacgatgtatttattcctcttaagccgcttagacaattggaaattatctcaggcgaatataatgatgttattaatgaaaaagttcatgtgaaaaataaagataattatttacattttaaacttaaaaatatgtctcatattactgatccaatgatgagtttaaaacaaatttatcctaatactttagcgctgacgaatgaaacttttaattacaatgaagaaaataatgctatagaaataagtgaaaaagatgacatgtcaatcatcgaaatgttttataaacatataactgatgaagaattatcggatatccaatctaaaaagataaaaaatattttagaaaacgaattgagaaaggaggattaatgaatgaaaccattacatttaaagttgaataatttcggcccctttttaaaagaagaaattgatttttctaaaattgataataatgaattgtttttaataagtggtaagactggatcgggcaaaacaatgatttttgatgcaatgacttatgccttgtttggtaaagcatcaactgaacaaagagaagaaaatgatttgagaagtcatttcgctgatggcaaacagccgatgtcagtaacgtttgaatttcaattaaatcatcgaatttataaagtacatagacaaggcccttatatcaaagaaggtaatacaacaaaaacgaacgctaaatttgatgtatttgagatggtggatggcaagtatgaaattagagaaagtaaagtaatttcaggtacccaattcattattgaattattaggagtaaatgcagatcaattccgacaattgtttattttgcctcaaggtgaattcaaacgctttttaatatcaaacagtcgtgaaaagcaagggatattaagaacactgtttgacagtgaaaaatttgaagctatacgagaaatattaaaagaagaagtaaaaaaagaaaaagctcaaatcgagaatagatatcaacaaattgaccttttatggcaagaaattgaatcatttgatgatgacaaaataaaaggcttattagaggttgccactcaacagatagacaaagtgattgaaaatataccactattacaagctaggtcgaaagaaatactagcatttgtaaatgaaagtaaagaaactgctattaaagaatatgaaataatagaaaagaaaacactagaaaataatatattaaaagataatattaaacaactcaacaaaaataaaattgatttcgttcaattgaaagagcaacaacctgaaatagaggaaattgaagctaagttaaagttgttacaagatattacaaacctattgaattatattgaaaatagagaaaaaattgaaactaaaattgctaatagcaaaaaagatatttctgaaaccaataataaaatattgaatcttgagtgtgataagcgaaacatagacaaagagaaaagaatgttagaagaaaacgaagatttaattgaaagtaaaatctcttttattgataaaactagagtgttatttaacgatattaataagtttcaacaaagttatctcaatattgaacgcttgagaactgagggagaacaattagatgatgaattaaatagtctaattaaaggtttagaaaaggtcgaagattcaataggtaataacgaaagtaattacgagaaaattatcgaactaaataatgcaataactaacataaataatgaaattaatgtaattaaagaaaatgaaaaagctaaagctgaattagataaactattaggtagtaagcaagagttagagaatcaaattaatgaagaaaaaactatattgaagaatctcgaaataaaattagatcgctacgataaatcaaaattggacttaaatgataaagaaagctttataagtgaaattaaatctgctgtaaagattggagatcaatgtccgatatgtggtaatgaaattcaggatttagggcatcatattgattttgacagtattgctaaacgtcaaaatgaaattaaagaaattgaagcaaatatccacgctataaaatcgaatattgctgtgcataattctgaaattaaatttgttaatgaaaaaatatcgaatattaatattaaaacgcaaagtgatttttcactcgaagtattgaataagcgtctgctagaaaatgaaaatgcattgagtaatcaaagagatcttaataaatttatagaacaaatgaaagaagaaaaagataatctaacgttgcaaattcataataaacaattgcgtctaaataaaaatgaatctgagttgaaattatgtcgagatctcatcactgaatttgaaacactctcgaaatataataatatcactaattttgaagtggattataagaagtatattcaagatgtgaatcaacatcaagaacactcaaaggagattgaagataagttaatacaattgtctcaaagaaagttaattgagcaaaataatctaaatcactatgaaaatcaactagaaacttacaataatgacttagaattgaatgaacaatctattgaaatggaaatgtcgaggctgaatttaactgacgacaatgatataaatgaaataatagcctggaggggcgagcaagaggagttagagcagaaaagggatacttataaaaagcgttatcatgaatttgaaatggaaatagctaggttagaatcattaaccaaggataaagagttattggactctgataaattaaaagatgaatatgaactaaaaaaaggaaagatgaatacactgatagatgaatactctgctgttcattatcaatgtcaaaataatattaataaaacacaaactatagtttcgcatattaattacttaaaccaagaattgaaggatcaacaagaaatatttcaattggctgagattgtcagtggtaagaacaacaaaaatcttacattggaaaactttgtcttaatttactatttagatcaaattattgctcaagcaaatctgagattagcaacaatgtcagataatcgataccaactaattaggagagaagcggtttctcatggtcttagtggcctagaaattgatgtatttgatttgcattcaaataagtctagacatattagctcgttatcaggtggagaaactttccaatcgtcgcttgcattagctttagggttaagcgaaattgtacagcagcaatcaggaggtatttcactagaatcaatatttattgatgaaggattcggtacattagatcaagaaacgcttgaaacagcgttagacactttgttaaatcttaaatcgactggtagaatggttgggattatttcacatgtgagcgaattgaaaaatagaatacctttagttttagaagtgaaatcagatcaatatcagagttcaacaagattcaaaagaaattaaaacataaaaaatagagatggtactttggaatgtatagaacaaccttagcccatctctttttatttaaaaattattttttctcacgtaataaatctctaatttctgtaagtaatacaacattttcttctacaactgcttcttcttcgacttcttctttcttcattaacgtatttgcaattttaacaaagacgaataaagcgaatgcgataataataaagtcaattacagattggataaataggccgtatttaatcccccagaatgaccattcttgagcaaaatctactgatccgaaaattttaccgattaaaggcataattatattttctactaatgaagttataatcttgttgaaggctgcacccatcactacagcgatagctaaatctaagacgttaccttttaaggcgaactctttgaactcttttaacattacactcaacctctcttttttaaatgtaacctcaattatacaacaaataaaaaaattagaaaatagattattcaagaaaatttgattatcgtaaagacctttgttatcctataaaggtgcgtgagtaaatgaataaaatgtttagataatgtttttattctactacataaaattaaatatagaattgaagggagtaattaattatgaattcttcttcaccagagaatccaaatggaaagaagtattcaccagtgttcatctatagtgctattgttgttgctatagtcgtattacttggtgcatttttacctgaacaattcaactatgttaccaataatattaaaatgtggattacagaaaagttaggttggtattatcttattcttactacgattatcgtgttcttctgtatattccttatttttagtcctattggaaaacttaaactaggtaaaccaaatgacaaacctgagtttaatacaatttcatggtttgctatgttgtttagtgctggtatggggataggcttggtattttatggtgcagctgaaccgatggcgcactttgctacaccacctacagcagatcccaaaactactgaagcttatacggaagctctacgttcaacatttttccattggggattccatgcttgggcagtttatggtgttgttgcgttagcgttggcatattcgcaattccgtaaaggtgaaccaggtttattatctagaactttacgtcctcttttaggtgataaagtagaagggcctattggtatttttattgacgttttatctgtatttgcgacaatcgttggggtagccgtttcgttaggtatgggtgctctacaaattaatggtggtttacattacttgttcaatgttccaaacaatacgtttgtacaagcgattatcatcattgttgttactatcttatttatagcaagtgcatggtctggattaagtaaaggtattcaatacttaagtaacttgaacatcggtttaggtactattttaatggtagctgctttaattgttggaccaactgttcttattttaaatatgttaactagctctacgggtagtttactaaacacattcttgtttaatagctttgatacagctgctttaaatcctcaaaaacgtgaatggatgtcttcatggacactttattactggggttggtggttaagttggagcccattcgttggagtgtttattgcacgagtttcaaaaggacgatcaattagagagttcatttctggtgtcttgctagttccagcaattgttagttttgtatggtttagtgtctttggtgtattaggcatcgaaacaggtaagaaacacaaagaaatttttgatatgactcctgaaacacagctatttggagtgtttaatcatgtgccatttggcattgttttatcgttgattgcattattattaattgcatcattctttattacatctgctgactcagcaacatttgtattaggaatgcaaacaacattcggctcattaaatccatctagtatggtaaaagttgtttggggaatttcacaggcattaatagcatttgtacttttattagctggtggcggtaacggcgctgaagctttaaatgcgattcaaagtgctgcaattataagtgcattcccattctcctttgtcgtcatactcatgatggtaagtttctacaaggatgcgaaccaggaacgtaaattcctaggtttaacattgactccgaataaacaccgcttacaagaatatatcaagagtcaacaagaagattatgaatctgacattcttgaaaagcgtcagtcacgtagaaatatagagaaaaaagataactaataaaatttagttaagtattttaataacaagtagtatgtcattctagtagctagaacagatatactacttgtttgtttttgtgggaaattgagtatattcaaaaggataagaacgagaatttcgttattaaactacgaattctcgatttttttatattttaagataggtttatttctgacaacttaatagaaaggggtttgacaaagctaaagtgaagtacgacggtataaacataaattaactatacttttatagaaaattaacgatacatataccggtatatgtatattaaaagaatgatattgtaaagtttgacgccataatttcctttctgctcaatgaaataatacatttaaaaattgaattgaattattcgcgaaattgataattattctcaattaataaaaaatacttattacaccttaccttaatgataagttttgcttatatactctgattaaaaagtcaaaacctaaattaagcgttttctaagcatgatgagttgtttatcaataaatataataatacaatttaattaaggcatataaatataaaaatgtatcaagggggatcattaaatggctgcaaattttaaagagcaatcaaaaaaacattttgacttgaatggccaaagttatacttactatgatttaaaagctgtagaagagcaaggtattactaaagtttcgaatttaccttattcaattcgtgttttattagaatctttacttcgtcaagaagatgattttgtaattacagacgatcatattaaagctttaagtcagtttggaaaagatgggaatgaaggcgaggtaccatttaaaccttctcgtgttattttacaagatttcacaggtgtaccagccgtagttgatttagcttctttacgtaaagcaatggatgatgttgggggagatattactaaaattaatccagaagtaccggtggatttagttattgaccactcagttcaagtggatagctatgcaaatccagaagcacttgaacgtaatatgaaattagaatttgaacgtaactatgaacgttatcagtttttaaattgggcaacgaaagcatttgataattacaatgcagttcctcctgcaactggaatagttcaccaagttaacttagaatatttagcaagtgttgtacatgttcgtgatgtagatggtgaaaaaactgcatttccagatacattagttggtactgattctcatacaacaatgataaatggtattggcgtactaggatggggtgttggtggtattgaagctgaagctggaatgcttggacaaccttcttatttcccaattccagaggttattggtgtacgattagtaaattcattaccacaaggcgcaacagcaactgatttagcgttaagagtaactcaagagctacgtaaaaaaggtgttgttggcaaatttgtagagttctttggtccaggtgtacaacatttaccactagcagaccgtgctacaatcgcaaacatggcacctgagtatggagcaacttgcggattcttcccagttgatgatgaatctcttaaatatatgaaattaactggtagatcagacgaacatatcgcgctagtaaaagaatatttgaaacaaaaccatatgttctttgatgttgaaaaagaagatcctaattatacagatgttatcgaattggatttatcaacagttgaagcatcgctttcaggaccaaaacgtcctcaagatttaattttcttaagtgatatgaaatcatcatttgaaaattctgtaacagctccagcgggcaaccaaggacatggtttagataaaagtgaatttgataagaaagctgaaattaacttcaaagatggatcaaaagctacaatgaaaacaggtgatattgcaatagcagcaattacatcatgtacaaatacatctaatccttatgtaatgttaggtgcaggtttagttgctaaaaaagcagttgaaaaaggcttgaaagttcctgaatacgttaaaacttctctagcaccaggatcaaaagttgttactggatatttaagagatgctggcttacaaccttatttagatgatttaggcttcaacttagttggttatggatgtacaacttgtattggtaattcaggtcctttattaccagaaattgaaaaagcgattgctgatgaggacctattagtgacatctgtattatctggtaaccgtaactttgaaggtcgtatccatcctcttgttaaagccaattacctagcttcaccacagttagttgttgcttatgcattagctggaacggttgatattgatttacaaaatgaacctattggtaaaggtaatgacggtgaagatgtatatttgaaagatatttggccatcaattaaagaagtttcagataccgttgatagtgttgtaacacctgaattatttattgaagaatataataacgtatacaataacaacgaattatggaatgagattgatgtaactgatcaacctctatatgactttgatcctaattcaacatacattcaaaatccatcattcttccaaggattatctaaagaaccgggtacgattgttccattaaatggtttacgtgttatgggtaaattcggtgattctgtgacaactgaccacatctctccagcaggtgcaattggtaaagatacgccagctggtaaatatttacaagatcaccaagtgcctattcgtgaatttaattcatatggttcaagacgtggtaatcacgaagtaatggttcgaggtacgtttgctaatatacgtattaaaaaccaattagcgccaggtactgaaggtggttttacaacttattggccaacaaatgaagtaatgcctatctttgatgctgcaatgaaatataaagaagatggtacaggtttagttgtattagctggtaacgattatggtatgggttcatctcgtgactgggcagcaaaaggtacaaacttattaggtgttaaaacagttattgcacaaagttatgaacgtatccatcgttcaaatttagttatgatgggtgtattaccattagagtttaaaaaaggtgaatcagctgattctcttggtctagatggtacagaagaaatttctgttaatattgatgaaaatgttcaaccacatgactacgtcaaagttactgctaagaagcaagatggtgatttggtagaatttgacgctatggttcgttttgactcacttgttgaaatggattactatcgtcacggtggtattttacaaatggttttaagaaataaattagcgcaataaaaatagatatcacggtaaaattttaatcggtatttgaggtactttgataatgctcaaaaatacctctataaactttatgatttaataggtcggttcaaaacctttgtgttcttggccggcctcttcttgtattttatgttagaatgagatataaagttaaactgaaagaaggcttaaaatgatatatagtattacagaaatagaagcgcgttatgctgaaactgataagatgggtgtaatttatcatgggaattatgcaacttggtttgaagttgcgcggttggattatatatcgaagttaggttttagttatgctgatatggaaaaacaaggaatcatttcacctgtgactgacctcaatgtcaattataaaaagtctattttttatccagaaaaagttaaagttaaaacttgggttgaaaaatattcgagattacgttcagtgtataaatatgagatttttaatgaaaaaggtgaacttgcaactacaggttccacagaattgatttgtattaaagaagatacttttaagcctatacggttggatcgttatttccctgattggcatgaagcctatagcaaagtgcaaacgctcaataatgaagggaaaacagtagagataatggatggtattgattctttataaattactataaatgtttggagaggcaatattaacaattaatctatgttaaatagtcaatacgttaacattaacgcaattagcgtgaagataagctaatatatagaaaaaacgaacttgttcatacaacaacagatgtgctaaaccaaagtacaacttccgaggttcagtacacatcagaatgtgtatacaagttcgttttattttagttattttgtggaataagaaatttcatcttcgtgatcaactacatttacaataatgtggtcatcttcaaagtaccacaaatctttttccgctacgacaacatttaaatcgtcatattgttgttcatagccaatatcaacatcttcctttggttcaactgtaaaagcaggactaaatccttgcttgagttggaattcgccaccatatcttacaaaaaacacgagcactttattattttcaggtaactcaagttcatttttaaaccaagttactgctgcatcagtaagttctatatgcataacaatgacctcctatatttattacagaatgggagtgggccccaactcgtattgtttgtggaatttcttttcgaaattctctgtgttggagcccagcccaacttccacattattgtaagctgaatttccatcagcttctatgttgggcccccgaccagaattgaaaaaaacctagttataagcacatttcgttctgttcactacagctaatattacattgtggggcctatgaccttgatttatgtctcggtctcaaatgttcttgtaaaaaaactaagtatagttgaattttaagttaaaaaaattgtttttgcaaaaataaaataatccatcaactgcaaaaaatatgcaatgatggactaatgtcaaaaaattgttacatccattttattttaggttcttcgcctctaaaaatccttgcgatattagagcgatgtctaattatcaatatgattgaaactaagaaactaacgactaataaaatatagtcttgaatgataagcgagccaatcacacagcaaattgctgcaacgatacttgctaaagaaacatatttaaaaatcttcaatacaataaagaagataattgcaagtattagtaaaagtatcgggttgactcccaagacgacacctgcactagttgcaacagctttgccaccttggaattttaaataaacaggataaacgtgtccaagtatagcgaataagccaacaattaaaccatttgtaaaaaaagtactaatagggccatctgcgtgaactggtaaccataaagggaagaaaacagttatgaatcctttgaaaatatctagaaatgttaccaagaatcctgcaggacgacctaatactctaaagctattagtagcgccagtattaccactaccaaattgtctaatatcttttttgaaaaataattttccaattacgaatccacttgggaaagcgccgataagataacttagtagtaacatgacgattatcatcataaatattacacatcctttaatatcttagaactattttatcatattcgtttaaattacggctaaaatttttaaaaacggggattaatatatggaattaagctctgaaagttaattgatacttgcattttacgctgatttatataagaataactattgtatagttttaaaaacgaacgtacgtttgcaggaggcgaaatcattggcaatgaataaacaaaataattattcagatgattcaatacaggttttagaggggttagaagcagttcgtaaaagacctggtatgtatattggatcaactgataaacggggattacatcatctagtatatgaaattgtcgataactccgtcgatgaagtattgaatggttacggtaacgaaatagatgtaacaattaataaagatggtagtatttctatagaagataatggacgtggtatgccaacaggtatacataaatcaggtaaaccgacagtcgaagttatctttactgttttacatgcaggaggtaaatttggacaaggtggctataaaacttcaggtggtcttcacggcgttggtgcttcagtggtaaatgcattgagtgaatggcttgaagttgaaatccatcgagatggtaatatatatcatcaaagttttaaaaacggtggttcgccatcttcaggtttagtgaaaaaaggtaaaactaagaaaacaggtaccaaagtaacatttaaacctgatgacacaatttttaaagcatctacatcatttaattttgatgttttaagtgaacgactacaagagtctgcgttcttattgaaaaatttaaaaataacgcttaatgatttacgcagtggtaaagagcgtcaagagcattaccattatgaagaaggaatcaaagaatttgttagttatgtcaatgaaggaaaagaagttttgcatgacgtggctacattttcaggtgaagcaaatggcatagaggtagacgtagctttccaatataatgatcaatattcagaaagtattttaagtttcgtaaataatgtacgtactaaagatggtggtacacatgaagttggttttaaaacagcaatgacacgtgtatttaatgattatgcacgtcgtattaatgaacttaaaacaaaagataaaaacttagacggtaatgatattcgtgaaggtttaacagctgttgtgtctgtacgtattccagaagaattactacaatttgaaggacaaacgaaatctaaattgggtacttctgaagcaagaagtgctgttgattcagtagttgcagacaaattgccattctatttagaagaaaaaggacaattgtctaaatcacttgtaaaaaaagcgattaaagcacaacaagcaagggaagctgcacgtaaagctcgtgaagatgctcgttcaggtaagaaaaacaagcgtaaagacactttgctatctggtaaattaacacctgcacaaagtaaaaatactgataaaaatgaattgtatttagtcgaaggtgattctgcgggaggttcagcaaaacttggacgtgaccgcaaattccaagcgatattaccattacgtggtaaggtaattaatacagagaaagctcgtctagaagatatttttaaaaatgaagaaattaatacaattatccacacaatcggggcaggcgttggtactgactttaaaattgaagatagtaactataatcgtgtaattattatgactgatgctgatactgatggtgcgcatattcaagtgctattgttaacattcttcttcaaatatatgaaaccgcttgttcaagcaggtcgtgtatttattgctttacctccactttataaattggaaaaaggtaaaggcaaaacaaagcgagttgaatacgcttggacagacgaagagcttaataaattacaaaaagaacttggtaagggcttcacgttacaacgttacaaaggtttgggtgagatgaactctgaacaattatgggaaacgacgatgaacccagacacacgaactttaattcgtgtacaagttgaagatgaagtgcgttcatctaaacgtgtaacaacattaatgggtgacaaagtacaacctagacgtgaatggattgaaaagcacgttgagtttggtatgcaagaggaccaaagtattttagataattctgaagtacaagtacttgaaaatgatcaatttgatgaggaggaaatctagtgagtgaaataattcaagatttatcacttgaagatgttttaggtgatcgctttggaagatatagtaaatatattattcaagagcgtgcattgccagatgttcgtgatggtttaaaaccagtacaacgtcgtatgttatacgcaatgtattcaagtggtaatacacacgataaaaatttccgtaaaagtgcgaaaacagtcggtgatgttattggtcaatatcatccacacggagacttctcagtgtacgaagcaatggtccgtttaagtcaagactggaagttacgacatgtcttaatagaaatgcatggtaataatggtagtatcgataatgatccgccagcggcaatgcgttacactgaagctaagttaagcttactagctgaagagttattacgtgatattaataaagagacagtttctttcattccaaactatgatgatacgacactcgaaccaatggtattgccatcaagatttcctaacttactagtgaatggttctacaggtatatctgcaggttacgcgacagatataccaccacataatttagctgaagtgattcaagcaacacttaaatatattgataatccggatattacagtcaatcaattaatgaaatatattaaaggtcctgattttccaactggtggtattattcaaggtattgatggtattaaaaaagcttatgaatcaggtaaaggtagaattatagttcgttctaaagttgaagaagaaactttacgcaatggacgtaaacagttaattattactgaaattccatatgaagtgaacaaaggtagcttagtaaaacgtatcgatgaattacgtgctgacaaaaaagtcgatggtatcgttgaagtacgtgatgaaactgatagaactggtttacgaatagcaattgaattgaaaaaagatgtgaacagtgaatcaatcaaaaattatctttataaaaactctgatttacagatttcatataatttcaacatggtcgctattagtgatggtcgtccaaaattgatgggtattcgtcaaattatagatagttatttgaatcatcaaattgaggttgttgcaaatagaacgaagtttgaattagataatgctgaaaaacgtatgcatatcgttgaaggtttgattaaagcgttgtcaattttagataaagtaatcgaattgattcgtagctctaaaaacaagcgtgacgctaaagaaaaccttatcgaagtatacgagttcacagaagaacaggctgaagcaattgtaatgttacagttatatcgtttaacaaacactgacatagttgcgcttgaaggtgaacataaagaacttgaagcattaatcaaacaattacgtcatattcttgataaccatgatgcattattgaatgtcataaaagaagaattgaatgaaattaaaaagaaattcaaatctgaacgactgtctttaattgaagcagaaattgaagaaattaaaattgacaaagaagttatggtgcctagtgaagaagttattttaagtatgacacgtcatggatatattaaacgtacttctattcgtagctttaatgctagcggtgttgaagatattggtttaaaagatggtgacagtttacttaaacatcaagaagtaaatacgcaagataccgtactagtatttacaaataaaggtcgttatctatttataccagttcataaattagcagatattcgttggaaagaattggggcaacatgtatcacaaatagttcctatcgaagaagatgaagtggttattaatgtctataatgaaaaggactttaatactgatgcattttatgtttttgcgactcaaaatggcatgattaagaaaagtacagtgcctctatttaaaacaacgcgttttaataaacctttaattgcaactaaagttaaagaaaatgatgatttgattagtgttatgcgctttgaaaaagatcaattaattaccgtaattacaaataaaggtatgtcattaacgtataatacaagtgaactatcagatactggattaagggcggctggtgttaaatcaataaatcttaaagttgaagatttcgttgttatgacagaaggtgtttctgaaaatgatactatattgatggccacacaacgcggctcgttaaaacgtattagttttaaaatcttacaagttgctaaaagagcacaacgtggaataactttattaaaagaattaaagaaaaatccacatcgtatagtagctgcacatgtagtgacaggtgaacatagtcaatatacattatattcaaaatcaaacgaagaacatggtttaattaatgatattcataaatctgaacaatatacaaatggctcattcattgtagatacagatgattttggtgaagtaatagacatgtatattagctaaaaactatatgcaatcacgaaattaaatgataaaatacagtaatgttaaattttgactaaattcaagggatttatattaaatgctgaccaagtacttatcgttaaattagcgatatactttgaccaaactaatataaatctcttgtattgtataagaaatgatgatgtatctctttatttactgaagtttcaattcggtctaattttatagaaggtgcatgattcatgtagaggatgcgaggggtttattttgaaagatttcgatagtttaattcctggatggtttaaagaatttgtccatgttggtaccgatctaatatggtctcaatatttaattggtctattattgacagctggattcttctttacaattagttctaaattcgtccaattacgaatgttacctgaaatgtttagagctttagtagaacgtccagaaactttagaagatggtaagaagggtatttcgccattccaagcatttgcgattagtgctggttcgagagttggtactggtaatattgctggtgttgcgactgcgattgttttaggcggtccaggtgcagtgttttggatgtggattattgcatttataggtgcagcgagtgcatttatagaagcgactttggctcaggtttataaagtacatgataaagatggtggattccgtggtggtccagcttactatattactaaaggtttaaatcaaaaatggctaggtatcgtatttgcgattttaattacaattacatttgcatttgtatttaacacagtgcaatctaatacaattgcggagtcgttaaatacgcaatataatattagtccagtaatcacaggtattattttagcaatcgtaacagctattattatatttggtggtgtacgtagtattgctacgttatcttcgttaattgtaccgattatggctatcatttacattggtatggttttagtaatattgttatttaatttagatcaaattgttcctatgataggtacgattattaaaagtgcatttggtatcgaacaagtaactggtggcgctgtaggtgctgcggttcttcaaggtattaaacgtggtttattctctaacgaagctggtatgggttctgcgccgaatgcagctgctactgctgcagtgccacacccggtcaagcaaggtttaatccaatcattaggtgtgttctttgatacaatgttggtttgtacagcaactgcaatcatgattttattatattcaggattaaaatttggtgataacgcacctcaaggtgttgcagttacccaatcagcacttaatgaacatttaggttctgccggaggtattttcttaacaattgcagttacactgtttgcattttcatctgtggtaggtaactactattatggtcaatctaatattgaatttttatcaacaaaccgtgtaatattatttatctttagatgtcttgttgtagtacttgtctttgtcggtgcagttgtaaaaacagaaacagtatggaatacggcagacttatttatgggcttaatggcaattgtaaacattatttccattataggactgtccaatgtagcttttgcattgatgaaagattatcaaaagcagaaaaaagaaggcaagaatcctgtttttaaacctgaaaacttagaaattaacttatttggaattagtgcttggggcgctaacaaatataagaactctgataaataaatatttttaatgtaacgattcaatttataaaaatcaaataaaccctgaggttttcaaattaaagcgaaaatctcagggttttaaatttgtactcaataatcatctgtatcattacactaattaatctaagatttgattatatattaacatagtaagattgagatttatttccttcattggtgtgcaaagactataccattgataagacatattgtgggatagatgaatataaatttattttagatttgcacaatttaatagtacgttttagtttgtgttgagtattaattcagataatatataaataaatagaattatttgtaaatatgtgagtcagatttttttattatagttattccactttgagaggcatcgaaattaaattaagatatatcatatagggtaggcgtgtaatagaacacaagtatttaaattattatactttcaagttagacatttccgatatataatcttaataatagaaaaataggtgatgataatgggagaatatattgttactaaaacattgaacaacaatgtcgtagtatgtactaataatgatcaagaagttattttaatcggtaaaggtattggttttaacaaaaaagagggaatggtgttaaacgaccaaactaatacaatagagaaaatttataaattagagagtgagcaacaaaaagcacattataaaagtttagttgaaatcgctgatgacaatgtattacaagtcattattgattcgttaaattttatttctaatactgcgatgaatgttgattcaaaacaacttgtagtttcattaacggatcatattatatttgcatataaacgcttaaaacaaaatcaagttattagcaatccatttgttatggaaactatgcagttatatagtgatgcatatcatattgctaaacaggtgattgatcagttaaatgcagcattagatgtacattttcctgaagatgagataggatttattgcattacatattgcatctaacacagaagatttatctatgcatgagatgactttgatcaataatgttattaaaaaaggtatagatatcattgaatcagaccttgtgacaactgttgataaggaatcattacaataccaacgttttataagacatgtacaatttttaattcgccgattaagaagaaaagaatatatacatgcacaagatgattttgtgtctatgattaaaaatcactatccgatttgctataacacagcatataaaattttaactatgatacaaaaacaatttgatgttaatatcagtgagtctgaaattatatatttaacattacacattcatcattttgaagaaaggattaatcaatcctaaattaagtgtattacacgggcgtttcgatactgtaaagggtatttgtatggtatcattgatgttagtaattttacataagtggactgtttttatacaacatcttatgaatattttaagtggtggtgaatctataattgaatgaaaatgaaaagaatataagaaagaactttttaaaatttaccgaatcacggtatatgaagtttgttggtggaaatgatttagtcttctcattaatagctctagtattgttgggtattgttatttttattttcgaaaaagtatcatacgtttttgatccttttatcatcgtttttaagacgatagcagcacctatcatcgtctctttaattctattctatctatttaacccaatcgtaaatatgatggagcgttatagaataccaagagttgcaggtatttctattatttatctagctgtagtaggtgttattacgttaattgttaatttattgatacctattattggttcgcaagtagatagtttagttaaaaattcaccgcaatatctagaaaaattaattaattctattgataaaatagcaaataatacgtttttctcttcgtattatagtcaaattaatgattggttaaattctttacctaagaaaataccatctatgttaagtgaatttacagatggctttgggtctaaaattgcaacgtttgcagaaacgattgctaacattggcgttgtgattgtcacaacaccatttgtattattcttcatgctgaaagatggacatcatttcaaagaattttcaacaaatattatgccgccaaaattccgaaaagattttcatgatctacttgaaaaaatgagtgttcaagttggttcatatattcaaggacaaattatcgtttcattctgtatcggtatactgttgtttatcggttattcggttattgggttgaaatatagcttagtattagctagtattgcggcagttacaagtgttgtaccatatttagggcctactatagcgatttcaccagctattgtaatagctgctataacatcgccgtggatgctcttaaaattagcagtagtatggactttagtacaatttgttgaaggacacttcatttcaccaaatatcatgggtaaaacactgaagattcatccattaactattattttcatcttgctgtgtgctggtaaactattaggcattgttggtgttattttaggtattccaggatatgcaattttaaaagtattagttacgcatttattccagttatttaaacgacgttataatcgtttctatggtaatgatgtaggtgaatatgatattaaagaaagtaataaaatagttgaataagtaattaaaaataccaatagactatacgtttgttggtattttttatggtgattataatgttgggcagtcaaatttatgattatcgcacatttttagcttataaattttacgaaaatttagccgtttataaaacacatgcataatgaaacgagtatttgccacttgattagtacctcattattatgacgaaaataaaaataaggggtatttttaatatattaagaagtactcataatcagctgttaattaatagtatttttcataagtattgattcatcattttctttatgttaaatatgaatcagtatagataaccatattgttctgtttgagatagaattattttctatttacttcttaatacagatgtcaatatgacaaaagtgttatataaatcaaaggtaaatgatatgctatttttatggtttatatgatatattttgatttataacagaaataattagaattgatgtgaaaaaatgaatcaggaagttaaaaacaaaatattttcaatcttaaaaattacgtttgctacagctttatttatttttgtagtaatcacgttgtatcgagagttatctgggattaactttaaagatactttggttgaatttagtaagatcaaccgtatgtcccttgttttattatttattggtggtggggcttcgcttgttattttatcaatgtatgatgtgattttatctagagctttaaaaatggatatttcattaggaaaagttttaagagtaagttatatcattaatgcattaaatgcgattgtaggctttggtggctttattggtgccggtgtaagagcaatggtttataaaaactatacgcatgataaaaagaaattggttcactttatttcattaatactgatttcaatgttgactggtttaagtttgttatcattgttaatcgtattccacgtttttgatgcgtcattaattttaaataaaattacgtgggtgagatgggtactttatgctgtgtcgttgtttttaccattatttattatatattcaatggttagaccgcctgataaaaacaatcgttatgtaggcttatattgtacattagtgtcatgtgtcgaatggttagccgctgcagttgtattatacttctgtggtgtcatagttgacgtccatgtctcatttatgtcatttattgcaatattcattattgctgcattatctggattagtcagctttattccaggtggttttggtgccttcgacttagttgttttattaggctttaaaacgctaggtgtacctgaagaaaaagtattattaatgctactactttatcgctttgcgtactatttcgtaccagtgattattgcattaattctttcatcatttgagtttggtacttcagctaagaaatatattgaaggatctaaatatttcattccggctaaagatgtgacgtcgtttttaatgtcgtatcaaaaagatattattgctaaaataccatcattatcattggcaattttagtattctttacaagtatgattttctttgtaaataatttgacgattgtatacgatgctttatatgatggcaatcatttaacgtactatcttttattggcaatacatacaagtgcctgtttattacttttacttaatgttgtaggtatttataaacaaagtagacgtgccattatttatgcaatgatttcgattatcttaattattgtcgcgacgttattcacttatgcgtcatacattttaataacttggttagttattatctttgctttacttattgttgctttccgtagagcacgtaggttaaaacgtccaattcgaatgcgaaatttagtcgcaatgcttttgtttagcatatttatactctacatcaatcatatatttatagctggaacattttatgctttagatgtttatacaatcgaaatgcatacgtctgtacttaaatattatttctggattaccattttaattatcgcaattattgttggtgcgattgcatggttatttgattatcaatttagtaaagtgcgtatatcttctaatattgaagagtgcgaagagattattgatcaatatggtgggaattatttaagtcatttaatttatagtggtgataaacagttcttcactaatgaagataaaaatgcatttttaatgtatcgctataaagcaagttcgttagtagttcttggcgatccaatcggtgatgaaaatgcctttgatgaattgttagaagcattctataattacgctgagtatttaggctatgatgttatattctatcaagttacagatcaacacatgcctttatatcataatttcggtaaccaattttttaaattaggtgaagaagcaattattgatttaacacaattttcaacttcaggtaaaaaacgccgtggatttagagcgactttaaacaaattcgatgaacttaatatttcattcgaaattattgaaccaccgttttcaactgaatttataaatgaacttcaacatgtaagtgatttatggctagataatcgtcaggaaatgcatttctctgttggtcaatttaatgaagaatacttatctaaagcgccaattggtgtgatgcgcaatgaaaataatgaagtaattgcattttgtagtttaatgccaacatactttaatgatgccatttcagtcgatttaattagatggttgccagagttagatttaccgttaatggatggattatacttgcacatgttactttggagtaaagagcaaggctatacaaaatttaatatgggtatggcaacgttatcgaacgttggtcaattgcattattcatatttaagagaacgacttgcaggccgtgtctttgaacatttcaacggtctatatcgtttccaaggattacgtcgttataaatctaaatataatccgaattgggaaccacgctttttagtttatcgaaaagataattcgctttgggaatcactttctaaagtaatgcgtgtaatacgtcacaaataattaaaatccaagtgctaagaggtatacagttatgcctgaagcgcttggattttttggtttctataaagaatgatttataaaatacggtacagataagaatatttaagtttcctatctgtaccgtattttaatattgaaatgagcttaagttaattcgcctaacttttattatcagtccaatcagtttcatcaagtataaatgttattgcttatttttgtattcttggcgtattttttgttcttctgcatagcgctctggatttttcttataaaaatcttggtgatagtcttcggctttgtaaaattgtgacgcgggtaatatttttgttgcaattgccttattagcattaatcgtatttttaagctgctcgatataagtctcagcgagttctttttgatgatcattagtgtaaaaaatagctgtttgatattgaggaccacggtcttgatattgaccacctgtatctaatgggtcaatgactgagaaaaatatttctaataacttattgtatgagaataatgcaacatcatattgaatttcaacagtttctaaatgaccactcgtacctgattttacttgttcgtaagtaggattttcaatatgtccgcccatatatccagaagttactttttctatgccgtcaaaggtgtcaaatggtttcgtcatacaccaaaagcaacctccggcaaaataagctgtattaatattcatttttgacatcctttcattagaccttagtacgatttattaagaaatcacttgctttttgaattgtttttatataacgttaatatgtgattattatagtacacaaaaatctatttttgaagatataaggtaggtaaatatggataaagaaactaatgacaacgaatatagacgtcaaagtgaacatcgcacttcggcgcctaagcgaaaaaagaagaagaaaattaggaaattacctatcattcttctgattgttgtaattttacttatcgcattagttgtatatattgtacatagttataatagcggtgtagaatatgccaagaaacatgcgaaagatgttaaagtacatcaatttaatgggccagtaaaaaatgatggtaaaatttctattcttgtactcggtgcagataaagcacaaggtggacaatcaagaacagattctatcatggttgttcaatatgactttatcaataaaaagatgaaaatgatgtctgtcatgcgtgatatttatgcagatattccaggatatggaaaacacaaaattaattcagcatacgctttaggtggtccagatctacttagaaaaacacttgataaaaatttaggaattaatcctgaatattatgcagtagttgattttactggatttgagaaaatgattgatgaattaatgccagaaggtgtaccaattaatgtcgaaaaagatatgtcgaaaaatattggtgtatctttgaaaaagggtaaccataggttgaatggtaaagaattacttggttatgcaagattccgtcacgaccctgaaggtgacttcggacgcgtgcgacgtcagcaacaagtaatgcaaacattgaaaaaagaaatggttaattttagaacagttgttaaattaccaaaagttgcaggtattttaagaggctatgtgaatacaaacattcctgattcagggatctttcaaacaggtttgagttttggtatccgaggtgaaaaagatgttaagtcattgactgtgccaatcaagaactcatacgaagatgtcaatacaaatactgatggtagtgcattacagattaataaaaacacaaataaacaagctattaaaaactttttagatgaagattaaaaataaacaaggcgatttctatcatactcagatagaagtcgccttgttcgttttcaaagaattatttggcatgcatcttatgaagaattattgatctgactttcttacgccagccacaccataatggtttggtttcatttcttctataacaacgtgaattgcttgtctatttgctcccgttgttttttctacggcgtcagtaacttcgctaactaaattttttaattgttcatccgaacgaccttctaataattttacattgacgattggcatcatccaaacctcctaatcattattaatttgagtatatcatgtaatacttaaaaattcatttgcaaaataacagaacatttgttctaaaatagttgaaatagaacaagtgttcgtatataatagaattcaagtaagggaggaataacagtgtataattatcatttattagaagatagggatgttctatgtattgaccaaaaaagtttttttgcgagtgtttcttgtattgaaaaggggctagatccattagaaacaaaattagctgttgttgcagatactaagcgtcagggttctgtagtattggctgcgacacctaaattaaaagaattaggcatcaagacaggatcgcgattgtttgaaataccacatagaaatgatatttacattatcaatccaagtatgcgtaaatatcttaatgtttcagttgctatttctaagattgcattgcgttatattccacctgaagatttacaccaatatagtattgacgaattttttatggatgttactgatagctatcatagatttagttctacagtacatgcattttgcgaaagacttaaacgtgaaatttatgaagaaacaggcatttattgtactgtgggcattggttctaatatgttattaagtaaaattgctatggatgttgaagcgaagcataatcaaaatggtatagctgaatggcgatatcaagatgtaccaacaaaattatggccaattcagcccttgcgagatttttggggtattaatcgtcgaacagaagctaaattgaataaaagaggaatttttactataggagatttagcgaaatatccatataaatttttaaaaaaagagttcggtattttaggtgttgatatgcatctacatgcgaatgggatagatcagagtaaagtacgtgaaaagcacaagatcagcaatccatcgatatgcaaaagtcaaatattaatgagagattatcattttgatgaagcaaaagtagtaatgcaagagttaattgaagatgttgctagcagagttcgagcaagaaaaaaagtggcaagaacgatacattttgcttttggctatagtgatgaaggcggtgtacataagcaatatactttgaaagatccaacaaacttagaaaaagatatttataaagtagtaatgcatttcgcagataaattatgtaataaacaagcactatatcgtacgttaagtatatctttgagtcaatttattaatgaggatgagcgacagttaagtttgtttgaagatgaataccaacgcaaacgtgacgaatgtctagctaaaacgatagatcaattacatttgaaatacggcaaaggtattgtgtccaaagcagtatcgtttacagaagcaggtacaaaacacggcagattaggtttaatggctggacataaaatgtaatgactatacggtttaagtaatatataactgtgattcgtataaaataagtctctaaagataaatatttcatatatcacaatagattttcacaataatatctaagaatacatgggatttatcaaaagagactcaataattattggatataacaatcaaaatcactcaatgcttgcataccgcgttctcggtcagtaggatttttgaaactaatttttaaagcaccgtatatatcttcgcgtacttctaagattcttaagttgcttatagatatgttatgtaaacttagtatgtaagtcactttgcttatcatacctgattcatccggaatatctacatatagatcatacgcagtatttagtccacctagttgtttagcgggcagtgcgtcacgatacgatttagcttcggcaaaaaatgataacaatttttcagaatcattgctttcaattagtctttctaaatcttgaaactgattttttagctgtcgaatcatttctaaaatatacgttttattactcaaggtgatatctttccacatttgtgcattactactagctatacgagtgatatcacgaaaaccaccagctgcaagtttattgactaaatgatgttcttgaccgttcttttgactaacatgaactaaactagatgcaacgatatgaggtaaatgacttacgacgcttgttacgtagtcgtgttcttcagcagtagttacaataaatttagcaagagtaggtgataacagttcttttaacgtgtttgctgcttgctcatttcttggctcattgtagactaaaatataataagcattttcaaataagtgctttttagcatttagtacaccggatttatgactaccagccattggatgaccactgactaaatgaatattatgctttaataaactgcattcgtgttgctgtatcattgctttagtactaccagtatcagaaacaataacaccaggtttagttggcatatctataagctcgctaagatatttatttgtgatagcaacaggtgttgcataaataattacatcggcttttttaatagcttcactataatttaaacatttttcattaataataccgattgatttagctttatctaactgagaagtatctgaatcgtatgcaataatattagtattagggttatggtattttatattgctagcaagacttccaccaattaatccaagcccaacaaataaaactgttgtcatataaatcaccttatttcgaaattttcagaataataacattgtaaatgagctgttgacacagtgcaatagtaaataaaaatcgataatagcattaatagataaacggatataaatcatctacaataaagagtatagtaacacaatggcaacggaggggtaaatcaatggaaccaatattagaaatgattaaaacattaacaggtattaatagtccttcaggagacacagaagaagcaattcaatttgtcgaaaaatatgcaaaagacttaggttatcaaacaacactaacaaataaaggtgcgttattaataacagtgccaggcaaaaatgatgaagtacaacgctgtattactgctcatgttgatactttaggtgcaatggttaaagaaattaaagaagatgggcgcttagcaatagaattaattggaggattcacgtataacgcgattgagggtgaatattgccaaattaaaactgatgctggtcaaatatatacaggaacaatttgtctgcatgaaacaagtgttcatgtatatagaaataatcatgaaatacctagagaccaaaagcatatggaaataagaattgatgaagtaactacatcagaagaagatacaaagagtttaggtatttcagtaggtgattttgttagctttgatccacgtacagttatcacgtcatcaggttttattaaatcacgtcatttagatgataaagctagcgtagcgatgatactacaattactaaagaaattaaaagaagagcaaataatattaccacatacaacacaattttatatttctaataacgaagaaataggttacggtgcaaatgcatcaattgattcgaaaatcaaagaatatattgcattagatatgggcgcgttgggagacggtcaagcatccgatgaatatacagtttctatttgtgccaaagatgcttcaggtccatatcataagcaattgaaatcacacctagttaatctttgcaaaataaataatattccatataaagtagacatatatccatattatggttcagatgcttcagcagctttacatgctggtgcggatatcagacatggtttatttggcgctggcattgaatcatctcatgcaatggaacgaacacatattgattctattaaagcgacagagaaattactatatgcatattgcttatcaccaattgagtaaacaaatagtgttgacaaatgtgaacgacctatgtaatataatgaactataaaaataattagaattttctaaagaaatagtagcagatatgaaacgtagcaaatagaaagctaatgggtgatgggaattagcacgccatatcttgtgaattggactttggaaaacaattgaatgagttttgaaagtgaacatgaattatgttaactaaggtggcaccacggtaacgcgtccttacaggtatatgcgttatgtggtgtctttttatttagacaaaatgtagtagttagttaaaggtagcaacagaaagttagtgggtgatgtgaactaacaccgagattaatgaaattgggttttgtctgcaacagaaaaattatatatagtaaagagtgaactatgaatatttcgaatattcggttaatttaggtggtaccacgcgtcagcgtcctttatattgataaggatgctggcgtttttttagaaaggagcgtaaagaatggatgtattctataaaaaaataaaagcaaatgtaacacctgaagttttagcacaacttcattccaagaagatcattttggaaagtacaaatcaacaacaaactaagggtcgctattctatagtgatatttgatatctacggtactttaactttagataacgatgtattatcagtaagcactttaaaagagtcgtatcaaatcactgaaagaccgtatcattatttaacgactaaaataaatgaagactatcataatattcaagataatcaacttaagccattaccgtttatatctggatatgttgggacgtgtagctttgatttagtaagacatgaatttcctaaattgcaatcaatacaattagaggatcacaagcagcacgatgtacggttatatatggttgaacaagtttatgtatttgaccattacaaagatgagttatatatcatcgcgacgaatcaattttcaaattcaacaaaatcagatcttgagaatcgagttaataagtctatcgaagacttaactaaaatccaaccgttcatgcctacacaagattttgattttaaaactaaagaaattcaatcaaatatttctgaagaaagatttatcgaaatgattcagtatttcaaagataaaataacagaaggggatatgttccaagttgtgccatcaagaatttacaaatatgcgcatcatgctaatcagcatttaaatcaacttacgtttcaactgtatcaaaatttaaaacgacaaaacccaagtccatatatgtattatcttaatatcgataaaccctacattgtcggtagttctcccgaaagtttcgtaagtgtcaaagataaaattgtaacaactaatcctattgcaggtacgattcaacgtggtgagacgacacaaatagataatgagaatatgaaacaactacttaatgatcctaaagaatgcagtgaacatcgtatgcttgttgatttaggtcgtaatgatattcatagagtaagtaaaataggtacctcaaaaattactaaattaatggttattgaaaaatatgaacatgttatgcatatcgtaagtgaagtcacaggtgaaataaatcaaaatttatcgccaatgacagttattgcgaatttattaccaacaggtaccgtttcaggtgcaccaaaattacgtgcaatagaaagaatttacgaacaatatccacataaacgtggcgtttatagtggtggtgttggatacataaattgtaatcataaattagattttgcattagcaattcgaacgatgatgatagatgagcagtatatcaacgtagaagcaggttgtggcgttgtatatgattctattcctgaaaaagaactgaatgaaacgaaattgaaagctaaaagcttattggaggtgagcccatgatcttagttgtagataattatgattcctttacgtataacctagtggatattgttgctcaacattctgacgtaattgttcaataccctgatgatgataatgtgctgaatcaatctgttgatgctgtcattatttcaccaggccctgggcatccattagacgaccaacagttaatgaaaattatctcatcctatcaagataaacccattttaggtatttgcctaggtgctcaagcactgacttgttattacggtggagaagtcattaaaggcgacaaggttatgcacggaaaagttgatacacttaaggttatatcgcatcatcaacatctgttatatcaagatgtaccagaacaattttcgattatgagataccattcattaataagtaatcctgataattttccagaagaattgaaaattactggacgtaccgaagattgtatacagtcatttgagcataatgaacgaccccattatggtattcagtatcatcctgaatcatttgctacagactatggtgtcaaaataattactaattttattaattacgtgaagaaaggatgaaaaccatgacattactaacaagaatccaaactgaatctatattgctagaaagtgacattaaggagttaatcgacatacttatttctccaagtatcggaaccgatataaaatatgaattattgagttcgtattcggaacgagaaattcaacaacaagaattgacatatattgtacgtagtttaattaatacaatgtacccacatcaaccttgttatgagggcggtatgtgtgtgtgtggtacaggtggtgacaagtctaatagcttcaatatatcaactactgtcgcttttgttgtagcaagtgctggcgtaaaagttataaaacatggaaataaaagtgtgacttcaaattcaggtagtacggatttgttaaatcaaatggacattcaaactacgtctgttgatgatacgccaaagcaattagatgaaaaaaacctcgtgtttatcggcgcaacagaatcgtatccaataatgaaatatatgcaaccagttagaaaaatgataggtaagcctacaatattaaaccttgtaggtccattaattaatccctatcacctaacgtatcaaatggtaggtatctttgaccctacaaaactaaaactagttgcaaagacaattaaagatttaggtagacgacgtgcaatcgtattacatggtgcgaatggtatggatgaagcaacgttgtctggtgataatttgatatatgaattgactgaagatggagaaatcaaaaattacacattaaatgcgactgactatggtttgaaatatgcaccgaatagtgattttaaaggtggttcgcctgaagaaaacttagcaatcacactgaatattttaaatggtaatgatcgctcaagtcgacgtgatgtggttgtcttaaatgcaggtttaagcctatatgttgcagagaaagtggataccatcgcagaaggcatagaactcgcaagcactttgattgataatggtgaagctttgaaaaaataccatcaaatgagaggtgaataacatgacgattttagaagaaattgttgaatataaacagttacttttacaaaatggctattatcaagacaaacttaataccttaaaaagtgtgaacattcagaataaaaaatcttttataaacgcaattgagaaagaaccaaagttagcaattattgcagaaattaaatcgaagagtcctacagttaatgacttacctgaacgagatttatcgcaacaaatctcagattatgagcaatatggtgcaaatgctgtatccattttgactgatgaaaagtactttggtggtagttttgaaagattacaagcattgacaacaaaaacaacattacccgtattatgcaaagattttattatagatccgcttcaaattgatgttgccaaacaagctggtgcatctatgattttactgattgttaatatcttatcggataaacaattgaaagatttatataactacgctatatcgcaaaatttagaagtgttagttgaagtacataatcgtcatgaattagaacgtgcctataaggttaatgctaaattgattggtgtaaataacagggacctaaaacgatttgtcacaaatgtggaacatacaaatattattttagaaaataaacagccgaatcattattatatttcagaaagcggtattcatggtaactctgatgtaaggaaaattttgcatagtggtatcgatggcttactaataggtgaggcgcttatgcgttgtgacaatctatctgaatttttaccacaactaaaaatgcaaaaggtgaagtcatgatgaaattgaaattttgtggctttacatcaatagaggatgttacagcggccagtcaattacctattgatgcgataggattcatccattatgaaaaaagtaaaaggcatcaaacaattgtccaaattcaaaagttagcgtctgctgttccaaatcatattgatacagtatgcgtcatggtaaatcctgatttaacaacaattgaacacgtattaagcaatacgccaattaacacaatacagttacacggcacagaatctattgattttatacaggaaattaaaaagaagtatccaagcattaaaatcattaaagctttagctgcagatgaaaacataatccaaaacataaataaatataaagggttcgtagatttatttattatcgacacaccctcagtgtcgtatggtggtaccggtcaaacatatgactggactattttgaagcacataaaagacataccttacttgatagcaggaggcattaactctgaaaatattcaaacagttaatcaacttaaattatcacatcaaggttatgatcttgcatcaggtatagaagtaaatgggcgaaaagatatagaaaaaatgacagcgattgtaaatattgtgaaaggagatagaggaaatgaatagacaaatacaaacagaagcagatgaattaggtttcttcggtgaatacggagggcaatatgttccagaaacattaatgccagcaattattgagttgaaaaaagcttataaagaggcaaaagcagacccagagtttcaaagagaactggaatactatttatcagagtatgtaggacgcgcgacgccacttacatatgctgcatcatatactgaaagcctaggaggcgctaaaatatatttaaaacgagaggatctaaatcatacaggcgcccataaaattaataatgcgttaggtcaagcgttgcttgctaaaagaatgggcaagaagaagcttgttgctgaaacaggtgcgggtcaacatggtgtagctagtgctacggttgctgcattatttgatatggaacttgttgtctttatgggaagtgaagatattaaaagacaacaacttaatgtatttagaatggaattacttggtgcaaaggttgtggcagttgaagatggtcaagggactttatcggatgcagttaataaagcattgcaatattgggtaagtcatgtagatgatacacattatttattaggttctgcattaggtccagacccattcccaacgattgttagagattttcagagtgtgattggtaaagaaataaaatcacagatattgaagaaagaaggtcgacttccggatgcaattgtagcatgtatcggtggtggctcaaatgcaatcggtacattttatccatttattaaagatgatgttgcattatatggtgttgaagctgcaggtcaaggtgaggatactgataaacatgcacttgcaattggcaaaggctcaccaggcgtattacatggtactaaaatgtatttaattcaagatgaaggtgggcaagtgcaactagcacattctatttcagcaggacttgattatcctggtattggaccagaacattcttattaccacgacattggtagagtaacttttgaaaatgcaagtgatacacaagcaatgaatgctttaatcaactttacaaaacatgaaggtattatacctgcaattgaaagtgcacatgcactgagttatgttgaaagactagcgcctacgatgtcgaaagaagatattattgtagtaacaatttctggacgtggcgataaagatatggaaacaattagacaatatatggcagagcgaggtcttgcaaatggctaaattatttataccttatattatgggagataaagattttattgaaaatgcaacattgttgagtgaaaatggtgcagatataattgaaattggtgtacctttctctgatccggttgctgatggtccagttatcatggaagcaggtcaacaagcgattaaacaaggcataacgatagattatattttcgagcaattagaaaaacacggtaatcaaattaagtgtcattatgtattaatgacgtattataatattatttgtcattatggagaacaagcattttttgaaaaatgtcgagataccggtgtctacggcttaattatacctgatttaccatttgaattatcgcaacgtttaaaccaacaatttagtcactatggcgtcaaaattatatcgttagttgcgatgactactgatgacaaacgtataaaagatatcgtatcccatgcggaaggctttatttatactgtgacgatgaatgcgacaacaggacaaaatggtgcgtttcacccagaattaaaacgaaaaattgagtcaattaaagcgatagccaatgtgccagttgtcgcaggatttggcataagatctccacaacatgttgcagatataaaagaggttgcagatggtatcgttattggtagtgaaatagtaaaacgatttaaatctaacacgcgtgaagaaatcattaaatatttacaatctatccagcaaacattgaataattaagtttacttgatttaaaaaaattagtcgaatactgtttgaaaaagtgaaaaacggtgaattataaaattgaatagaaatgatacaaaagtaatatgagcaaacccaaacgttcatattactttttttgaaattgtatgcaaaaatctaaatttaaccataaaagtatacgcaattaaagcgtttatgttttagttttaacattaactattgtatacttatttagattagatttattatttttgacatttgcagaggggaaatagaaaaactgcaaatacggaaatgaaattaattaacgagagacaaataggagtaatgataatgaagtttacaaatttaacagctaaagagtttggtgcctttacagatagcatgccatacagtcatttcacgcaaactgttggccactatgagttaaagcttgctgaaggttatgaaacacatttagtgggaataaaaaacaataataacgaggttattgcagcttgcttacttactgctgtacctgttatgaaagtgttcaagtatttttattcaaatcgcggtccagtgatcgattatgaaaatcaagaactcgtacactttttctttaatgaattatcaaaatatgttaaaaaacatcgttgtctatacctacatatcgatccatatttaccatatcaatacttgaatcatgatggcgagattacaggtaatgctggtaatgattggttctttgataaaatgagtaacttaggatttgaacatactggattccataaaggatttgatcctgtgctacaaattcgttatcactcagtgttagatttaaaagataaaacagcagatgacatcattaaaaatatggatggacttagaaaaagaaacacgaaaaaagttaaaaagaatggtgttaaagtaagatatttatctgaagaagaactaccaatttttagatcatttatggaagatacgtcagaatcaaaagcttttgctgatcgtgatgacaaattttactacaatcgcttaaaatattacaaagaccgtgtgttagtgcctttagcgtatatcaattttgatgaatatattaaagaactaaatgaagagcgtgatattttaaataaagatttaaataaagcattaaaggatattgaaaaacgtcctgaaaataaaaaagcgcataacaagcgagataacttacaacaacaacttgatgcaaatgagcaaaagattgaagaaggtaaacgtctacaagaagaacatggtaatgaattacctatctctgctggtttcttctttatcaatccatttgaagttgtttattatgctggtggtacatcaaatgcattccgtcattttgccggaagttatgcagtgcaatgggaaatgattaattatgcattaaatcatggcattgaccgttataatttctatggtgttagtggtaaatttacagaagatgctgaagatgctggtgtagttaaattcaaaaaaggttacaatgctgaaattattgaatatgttggtgactttattaaaccaattaataaacctgtttacgcagcatataccgcacttaaaaaagttaaagacagaattttttaggaagggaattatcaaaacatgaaatttacagagttaactgttaccgaatttgacaactttgtacaaaatccatcattggaaagtcattatttccaagtaaaagaaaatatagttacccgtgagaatgatggctttgaagtagttttattaggtattaaagacgacaataacaaagtaattgcagcaagccttttctctaaaattcctactatgggaagttatgtttactattcgaatcgtggtccagtaatggatttttcagatttaggattagttgattattatttaaaagagttagataaatatttacagcaacatcaatgtttatatgttaaattagatccgtattggttatatcatctatataataaagatatcgtgccatttgaaggtcgcgagaaaaatgatgccttagtaaacttgtttaaatcgcatggttacgagcatcatggctttacaactgagtatgatacatcgagccaagtacgatggatgggcgtattaaaccttgaagataaaacacctgaaacattgaaaaagacatttgatagtcaacgtaaacgtaatattaataaagcgataaattatggtgttaaagtaagattccttgaacgtgatgagttcaatctattcctagatttatatcgtgaaactgaagagcgtgctggatttgtatcaaaaacagatgattatttctataactttattgacacatatggagataaagtattagtaccattagcatatattgaccttgatgaatatgtgttaaagttgcaacaggaattgaatgacaaagaaaatcgtcgtgatcaaatgatggcgaaagaaaacaaatcagataaacaaatgaagaaaattgcagaattagataagcaaattgatcatgatcagcatgaattattgaatgcaagtgaattgagcaaaacggacggcccaattctaaaccttgcttctggcgtttattttgcaaatgcatatgaagtgaattatttctctggtggttcatcagaaaaatacaatcaatttatgggaccttacatgatgcattggtttatgattaactattgcttcgataatggttatgatcgttataatttctatggtttatcaggtgattttacggaaaacagtgaagattatggcgtataccgctttaaacgtggatttaatgtacaaatcgaagaattaataggggatttctataaaccaattcataaagtgaaatattggttgttcacaacattggataaattacgtaaaaaattaaagaaatagatgtaaatgatgttagggcttatagttattgatactataagctcttttttatgtgttttaataaagcctcgaatgatatattaaatgacaagtttaacaagtgattgcaataaatataaatacgaattgcacaatctatttgcaaatgattgagttgagtatacgttttaattcattcaatatgactcaaaacaagtcaatatgtattatatttttggtgaataaaccttagcataacaatctatgtctgattttatatatgtgtgggcaagtgcgtgatatcaaatgtcatatttgtctgattgtaatttataaaatgcatgagcacttattgctgtaacaaattctagcaaagtaatcagtttgtatattagaaataaaaataatgatagatgtatgatcgatataaagatttaatatgcaccaaaacgtgagtattggtttaacgaaacataacatgaatgtaaatttagtttactgacacaaacactacacaaacatacggttatataagtccccttatggaatttcaaattttagtttacataatatatattataggaagttatatatctaatacaaaaggtgccctacattatcatgtacttacatatgctataatcaaattattctattgtttggagtgatttgatgaaatttgtatttgatattgatggtacactttgttttaatggtaaatcaattgatccatcaatcgttgatgcattgttacaattacaaaattctggtcatgaacttatatttgcatctgcgcggccgattcgtgatttgttaccagttttaccagaagtctttcatcaacatacattaattggcgcaaatggcgctatgttttcacagcaatcaaatatttcggttatcaagccaattcaagcttatacatatcatcatatcttacgaataatacaaaaatatgaattagattatattatcgatgatgattggaattatgctgctaaattagacgctgagaacgcgatttttgagcgcttagatccacataagctggctagttgtattgatgttgcaaatattgacacaccaatcaaaataattttattaaatatagaaccgtcacaaattacaagcattttaaatgaactaaatgaatatcatcaagaactagaaatcattcatcattcaaatgagtttaacattgatattacagcgcaaaatattaataaatatacagcgctacaatacatatatggtaaagatgttgaatatatagcatttggtaatgatcacaatgatattgtcatgctacaatatgctactaatggctatattgtagggccatcagaagataatacacatacaatattgaaattgaatcatgtaacacatatagatagtcatgcccaagctatttgcagttcattaaatttatatgaataaaaacatccccttatcaattgataatcattatcatttaacagggggatatatttttaatagaattcgtcttcatcttcaaataaatcttcttcttcgtctaatccaaacaactctgccatttctccatgttcaattagcatatttaaatatgcatcgcgaagttcttctttactcatatcattaaccatttctttaagagaatcaatccacatatttctacgtaagtgatagtcttcttcaacttcgtttaacatgattatatgtttatttgcttcttctggactagctgtaaataataatgcaattaaatgtttacatatcacgcgtcttccatcagcatgaggacaattgcatttggattttctaggatgttccatatcaatatagcaacgatatacattgctaccactaccttttacttcagcctcaaattgagtttcagaatatgattttaagttaatgacacatttactttgataataactaaagcctctttctatagaacgtatacttgcaatatcaagtagtcccattatgacactccttttaaatattcgttatttaagcgaaaataaaggtaatatacacttatattaagattaaggatttatctttattttaatatatcatatgaatattgcatacttatacttttaaaatgtaaatgcttgtgttaattcttttgtataaggatgtctatctgaattgaataattcaaccgtttcaaaatcatcaacgattgcaccatccttaatgacaataattcgattaactaagcgttgtagtaccgataagtcatgtgatatgacaactaaatgatttaaattcgcaatggtttgctcctttaaaatgcttattacgttttgctcagctataacatctagatttgacgtgatttcatcacatattaaaacacgaggttgcgctaataatgaacgcataacattaaatctttgtaattgtccaccacttacttcattaggataattagataacagttgtgaatctaaatcaaagtttgataaatgttgtaataataattccagttgattgtcatcggcttttaacctacgataatattttagcgcttcttttaatgagtcttcaattgtccaatcaggattaaaacttgataatgcatgttggaaaattggtaatacagtatcatcactcatataaatgctcccattaatcggcttaagcaatcctaataacaatgctgccaaagtacttttaccactaccactttctcctaaaatgccgacattttcaccatcatgtattttagtattgatgtcttctaacactgcctgtcttttattatagccaaatgtcacatgttttagctcaatcattatgatccctctttaattgtgttcgatatttaattaaaaattcggtataaggttgtaatgtatcgtacttaaagtgctttatgtcaccgcgctcaacaatgtcaccgtcttttataacattaatatagtcacaatactttaaaacgtgacttaagttatgagtgattataaataatgtttgaccgtgttcttttacaatgtgttgaagtaaatccataattttatagccgttaataacatctaatgatgctactggttcatctgcaataattaactcaggttctaacattaaaacacttgcaatatatacgcgttcaagttgaccaccagaaagttgaaaactgtatttctttaatatttcttcgctacttaagttaacccacgacaatgctttatcaatttgagataatgctgcttctttactaactttaaaatgagtacgataaattgcaatcaattgttttcctaatttcgagtgatcattaaaactttcagcataattttgtgaaatatatccaacagtgcgaccataaaattgttgcatgttgtttacgtttttattattgaagtaataatgatcatactgacaatttaaatcagatggtaaaaaatttagcaaagcttttaccgttaaactcttaccagcaccactttctccaattaaagcgttaaccttttgttgataaattttcaaattgatgccatttattaaagatttacctttttgattcttgataattaaattttgtatatcaatgagactcataatattcacctcgttgtttcaacaatttatctcttagtgcatcgccagtaagattaaaaattaaaatcgttgtagcaatgacagaagcaggcgcaatgagcataattggatgtgacgaaataaaatctctgccaagttgcaacatagcgccccactctggtgtcggtggttgtgcacctagtcctatgaatgataatgagctgatgtataaaatgattttcccgaaatcgaccaccatcaaaacgataattgacggcattatcttaggtgttaagtggcgtaacaatattaccctagttggtacatgaaataattttgccattttaatgtaaggtttggtaatttcgctattaacaatacttcttgttaatcttgtataattcatccattttataattgtaattgcaataactaaattccaaatacttggctgaaaaaaacttgctaatgctatcatgataataaattccggtatacttagaccgatatcaacaatgcgtaatataatgcgctctatccatccttttttataccctgcaagtaatccaagtgttgccccaataataacaatagcaattaaagttaagattgtgatgaataatgttgatcgtgcaccaacaatgacccttgtaaataaatcacgaccatagtcatctgttcctagtaaatgggtccaacttattggttcaaacgtttgcgataagttaacttttgttgcatcagcactattcacaaagaattgcaaaataatcataattataaaataaaagataaatatataaaatataaaattacctttagttaaacttctaagcacgtagatcaccactttctaagattgatgatacgtttgaattatttttttgatttttaaaatgtaaacgttgttttggatcaaacaatagagccagtaagtcagcaattgaattgattaacaccacaaaaaatcctataaacaatacacacccttgtatgattggataatcccgagatttaatactatccatcaataagtaaccaatgccaggtatatcaaataaattttcaataacaactgtaccgccaataagactacctagagaaatacctaacaatggaataataggtaaaagcgttggtttcaataaatcatgcatcaaaatatatcgttcgctcataccgcgtaatcgtgatgatttaacgatattgctttgatatagcgaaagtaaatttgaacgaattaatcgaataatatacgcacacatacctaatgacaatgtaaaaacaggtaatacaatctgattccataaggcactatcaatatttaataaattggtgaaaatgaataataaaataatgccgatgaaaaacgcaggcaagctaattgacaatgttgatacagttctaatcactttatcagtcagtttgtgatagtgtcttgctgaaagcacacctagtggtatcgatatcgctaatgacaaaactaatgttgaaaaagatataagcaaagttggtggtgcatactcaaatagtgactgtgtaactggttctttagtttcgaaactacgtcctaaatttaattgaagcaattgttgcatccattgccaccattgcgatatgattgaattctttaaacccaatttttcttcagttgcatttatttgttctgccgacacatgtgacacatcaaggtgaagtattttatcaacaggatttcctggagataatttcatcaaaatgaaagttagtgttgaaataacaaataaaacaactaccatttgaattagtctgtacaaaatagaccttattatgaacataatagtcccccctcctcatgtaagttaagaatattttgaacttatatgagaattacacaaatttttgtaacttacaaataaagaaccacgattcattatagtattatacaaaaagaaattgaagtgaatttatttattttaacaataaacacttttaaaatgagtatttttatttagagttgataacctacaatttaatacgaaatcaaaatttaaatttaagcaaaataaaaacaactatagcacttttaataaatccgttcttaaagtttccattaaaacaatacttaagggattttttaaccttgtgcatatagttgtcgaatattattttttatctttacggcgaagttcagcaccctcatagccgtatttttcaatttgcttttctaatttacgcgcttttctttctttacgccaatttctagtaaaataccataatagaaaactaattaataaactcataatcgctaaaaatgcagcgtatcctaataatggttgatattttatatcttgaaaatttggaataaaaaatgcaagcacacctaatataacaaatgtaattactgctgaaacaaaccatttatttaaaactaaacaacagaatattgttaataaaatcattattaatgttgtgatccataaataattaggcatatcgaataatgtcataaccattctccttttatttcattactttccttgtatacattttattataaatttttaaaaacttaaacaatagcagtcagtttcaagcaatattctatctactattagaaaaaacattgttccttgcgacatggaaatcgtaacattatcgtttaggagacaaaattatgtataatgaatgtattataccaaaggagtgattatatgtctcaaggtttacctttaagagaagatgttcctgtttcagaaacatgggatttagtagacttatttaaagatgatcaacaatattatgaaagtattgacgctctagtacaacaagcaaatcaatttcatcatacatatgcaacaacattaaattcaatcgaacaaattaatactgctttagctgaattagaaaatattttaatcgcattagatcgcttaagtaattatgcagaactacgtttaagtgtagatactagtaatattgaggcacaagtattgagcgctaaattatctactacatatgggaaaattgttagccaattatcatttgtcgagtcagaaatacttgaattaccagaagaaatacttcaacaattagaagaatcatgtccatatcaacactatattaaacagttaattaaacaaaagccattccaattatctgcgtcggtagaacaagtattagcaactttatcacctacgctaaacagtccttacgatttatacggcacgacaaaaatgctagatattacattcgattcaattgaacatgatggtacaacgtaccctgtcgactatgctacatttgaaaatgattatgaagataataaagatcctgagtttagacgtaaaagtttcaaatcgtttagcgatggaattcgaaaatatcaacataccaccgcggctacatataatatgcaagtacaacaagaaaaaattgaagctgatttacgtggatttgaatcagtcatcgattatttattacatagtcaagaagtaacgcgtgatatgtttgaccgtcaaatcgatatgattatgcgtgacttggcaccagttatgcagaaatatgctaaacttttacaacgtattcacggattagataacatgcgttttgaagacttgaagatttctgtagaccctgattatgaaccagagatttcaattgaagactcaaaaaattatattttcggtgcgttaagtgttttaggtgatgactatacaaacatgttacgtgaagcatacgatcagcgatggattgattttgcacaaaataaaggtaaagatacaggcgcattttgtgcaagtccatactttacacattcatatgtatttatttcttggactggtaaaatggctgaagcatttgtcttagcacatgaattaggtcatgcaggtcattttacattagctcaaaaacatcaaccatatcttgaatcagaagcatcaatgtactttgttgaagccccttctacaatgaatgaaatgttgatggccaattatttatttaacacaagtgataatccaagatttaagcgttgggttattggctcaattttatctagaacatattatcacaatatggttacccatttattagaagctgcttatcaacgtgaagtgtatcgcaaagtagatcaaggtgaatctttaaatgcgccgacattaaatgaaataatgctaaatgtttataaacaatttttcggagatgcagtagacatgactgagggtgctgaattaacatggatgcgtcaacctcattactatatgggattatattcgtatacgtattctgctggcttaacaatcggaactgtcgtttctcaaaagattaaaaacgaaggccaaccagctgttgatgcttggttagaaacattgaaaaaaggtggcagtgtatcacctgtcgaacttgcaaacattgcaggtgtagacattactacagaacagccacttaaatctacaattcaatatatttctgatttagtggatgaagttgaaaaattaacagatgaaattgagcaagcaaataactaagatgcgagacaatttatagtagaacaatataaaccaagattttcacattactaattgtgagaatcttggtttttttgagggtttatgaataatagaaatatatatttatcgtaagggattttatagtaataactttaagttattgttcgtaatgtgtacctgttaaataaaaataaacactttcagcgatgttaattatatgatcgccaatacgttctagatgtctcgctgctaaatgggcttgtgcagcgacaaatggatcgttatcaatcagatatgttgcattaatgatatgtctatataaatcgtctatatcttgatcacgttctataatttctctaattaaaacagtatctttctttttaaatgcttggtctaaatcttttaacattaacatggctaatttccccattgtttttaaacgggttaacacataatcatctgtaatctttgtacgcaatcgaatattggcaatactcgctgcattatcaccgatacgctctaaatcagaagcaattttcaatgaagaaatcatcatacgcaaatcactcgcaatgggctgttgcttcgtaattaacatgatcactcgctcattgatatcataatttaattgattgatatgcttatcgtttttaactgtttgtcgcgcaaaacttctatcgtcaatacttaatgactttataccattttcgatactcacatagacatttgcgcctaatcgacgtaattctttaataagttcatcaagttgttcttgatatcgttgtctaattattgccattatatatcaaccaaaccttcctgaaatataatcttctgtctttttatttgatgggttagagaaaattttatcagtatcatcatattcattgacataaccatttaagaaaaaggcagttttatctgatacgcgtgcagcttgttgcatattatgtgtaaccataataattgtatacttttcttttagttcttgaaccaactcttctactcttaatgttgagattgggtctaatgctgatgtcggttcatccattaaaatgacttcaggttcaattgctaaacaacgcgcgatacaaacacgctgttgttgcccaccggataaactatatgcatttgtgtgcaacctatcctttaattcatcccaaattgcagcaccacgtaatgatttctcaacgatttcatcaagaacttttttatttttaatgccgtgaatctttggaccgtaagtaatattatcgtatattgattttggaaatggattaggttgttgaaagaccatgcccacatttgtacgtaattgttctttagaatatttttgatcaaaaatgtcttgattacgatataatattttaccagctgttttgactgtgggtactaattcaaccatgcgatttaaagttttaatatatgtcgatttaccgcaaccagatggacctataattgcagtaatttgattctcataaatatctaaattaatattttgcaatgcatgattatcgccataccataaatctagattttgtgttgaatagattaccgaatgtgtgcttgtatcatttggtttagtatcatgactttttgagacttcaaatgcatgactttgagatatttgtttagtttgtgcaagtgtttgcgtcatatttaaaactccctttttaatagataaatgagatagtttgtttaaattagaattttttactaaatttgttacgtaaaataatcgcaacgccattcattaagattaagataactagtaaaacgataatgcctgccgatgcaacattctggaattcttcttgtggcattttcgcccaagtaaatatttggataggtaatgctgaaaattgatccaatatacttctaggtgttgccaataatatagtcggtataccgataagcacaagtggtgctgtttctcccagcgctcttgaaagagacaaaatgaatccagttaaaataccaggtaacgctgctggtaatacaacacgtcttatcgtttgccatttattagcacctaagccgaaagaagcttcgcgtactgagttaggtacagctctaatcgcttcttgactggaaacaataatgattggcaaaatcaataatgtcattgtaagtgctgctgccaatatactgttgcccatttttaaagcttcgataccagcaccgcctacaaacaatgtataaccaagtaaaccaaacacgactgacggtacaccagctaaattggaaatactgattttaacaaactgagtaaatttgttatttttcgcatattcttctaagtatatagctgtacctatccctaggatgattgataatggaatgatacttaacattaaccaaagtgaaccgattaatgcgcctttaacgccagccatagatggtgttgaagaagaaaaattagtgaaaaactgtaaatttaaatgacttacccctttaatcaatgtttgagttaacaacgcaataagtacgacaagtcctaataatgtacatgctaaaaatatgagtttgaacactttgtttttaaccgttctggatgataaatgtttttggacaagttgttgatcgacgagtgattgtctatgattatctgtcggttccatattaatactcctccctaaaacgcttagaaatccattgagaaagtaaattcatgattaaggtaaagataaataatgtgaatcctacagcataaatactgtaataaatattggatccaaatgtcgcatcacctgtcgctatctcaacgatatatccagtcattgtttgaatcgagcttgttagacttaatgaagctgttggcgaactacctgcagctaatgatacaatcatcgtttctccaatcgctcttgaaatcgcgagaacgattgaagctacaatacctgatgttgctgcaggaagtacgactttagttgctacttctaatttagttgctccaagtccataggcaccttctcgaattttatttggtacagatgccattgcatcctcactcaaacttgtgatgagagggacaatcataataccgacaactaagccgggacttatagcattaaactctccaagacctggtatgaaagatcttaatactggtgtaacaaaagttaatgcaaagaaaccaaacacaattgttggtattcctgctaaaatttctaatatcggtttaatgatgcgtcgtgcacggtcacttgcatattcacttaaataaattgctgcaccaagcccgactggaactgcaaatatagtggcaataactgtgatttttaaagtccctattatcaatgcccagataccaaacttagggtctgaaccggtaggattccaagtagtagaaaatagaaattcagttattggaattcttgtgaaaaaagtgatggtttctaaaagcaatgtgattaatatacctagtgttgttaaaatggaaatcgctgaaattgcggctaaaataactggtataattttgtcattatgcttcccttttttattattatttttttcaattaaagctttaacattagtagatgaagtcataatcaaacctctttctattactcccaaaataattagatttgtaaaataatgatgaaccactattttaagttgataagcttgtagactaactgaatgtcaaaatcagcgtctcgataaatcaagctttgcactctaaataatgattcaccatcaaaatcatgtttcaagacacatttgaaattgcgtcttattatttttttgtcttcagactttttatcatcagatttcttgtcgtctgatttttgatttttatcaataaatgcttttaaatcatctaattgtgatttgtatgttttctctggtgctgctacatatccagcttcttcagctgctttacctttatcttctaagacgaatttgataaattctgacattactttattatctttcaatgctttttcatttacataaatgaataatggtctacttaatgcataagagttatcttgaattgtttttttcgtaggctctgttgctttaccattttcatctttgattttaacttcttttaatttatctttattttgtacgtagaagttatatccaaagtatccgattccctctttgtttttcgttacagaagaaacgatagcatttgtatcagcatttttttctgctttaatatcttctttattcattacttcattttcaaagaagtcataagtaccatgacttgagtttggtgatacagcatttatttttttatctggccacttactattaacatctttccatgttttagcttttccagaataaattgcttttaattgctgtttgtctaattcatctacaaaatcattttctttatttacagcaactgttacaccatcttgcgcaattttgaattctttgtatttgatattcttatcttgtaatttttgcttctcttcatctttaattggtctagaagcatcagcgaagtctatatctcctgcaatgaatttttggaaaccagcacctgtaccagcttgtcctgctgagattttagcatcagagtgatcttgagcccatttttcatttaatttctccacaattggtgctactgttgatgagccatcaccttttgcttccccttttaaatcactattaccactgccaccattaccgccaccacaagcacctaataatagtgttgcacctaaagctgtagtaccaacaaattgccattttttcattgaaatatcctccctgtatgaacaacaaatagtatttgtattgattacatctttatcttaaccttgaattattaacctcatttttagaaactgtaaatgttacataaatgtttgttaagaaaatgtaaatattaatttttgttgttctaaaaaatattgactcattagtaaaattaaaatgcttcctgaaaaattatcgaaatttaaatatgaacaaaaaaatggacagatgaaattaaaaaactacttcatctgtccgatttaattttgaatataaaaaacacgcatcctacgatacgtgtaaaaatgattattcttttgagtcaattcgactccagccttttttagttaaagtgattttacctgtttctatattaataatcttctgtttatataagtgaccgattgcacgtttgaatgaacctttactcatattgaatacttctttaatcgcttcagggcttgatttgtcccagaatggtaattcaccatcatattcaactagtaaatcaaagatgacttgaccgtcatcgtctaaacgttcatgtgcaagtggtaaaaatgaaccatttaactcacctttatcattatgcccgataattctaacttgaacagattcacctagtctcggttcagctttacgttctgattcatgtacgaatattttgtaacctgattcacttaataagaagctaccaattcgtaatacgcggtaaggtttggcttcaatgacttcgttttttaaattatcgtcgtgtacaggtgtaaacatattttctacaacagattcactcgctaaacgtccatacatatgattctcacggtcaattcgcaatgtaactagcaaatgatcacctggttgtggccatagtgatttcacttttggtaaatcttcccatggtactaacacttcacggggtaatccaacatctatacgtgccccatcgcgatccgttttaagtactttagcaaaatcatatttatctttcgtaatatcaggcatattttgagttgcaaataattcacctgaacggtttggataaatgaagaaactatattcttcacctacttctaattcatcatcatcgttcatttctgattggtttaactttacgttttcaccgtttggtccttttaaaaggtaagttgagccttgtaaccctactacttcaaggaattctatagaacctactatatctttgtctaatgccatgttattctccttcgattcttgtattctttattattataacatgtgtgagtcattctatcattacaacttatatgaggtcgaaactgtgacgataatatgatataattcttccgttagaatatcgaatgaaaaaaaggagaaaatgcatgttacaagtaactgatgtgagtttacgttttggagatcgtaaactatttgaagatgtaaatattaaatttacagaaggtaattgttatggattaattggtgcgaatggtgcaggtaaatcaacattcttaaaaatattatctggagaattagattctcaaacaggacatgtttcattaggtaaaaatgaacgtctagctgttttaaaacaggaccactatgcttatgaagatgaacgcgtgcttgatgttgtaattaaaggtcacgaacgtctttatgaggttatgaaagaaaaagatgaaatctatatgaagccagatttcagtgatgaagatggtatccgtgctgctgaacttgaaggtgaatttgcagaaatgaatggttggaatgctgaagctgatgcagctaaccttttatctggtttaggtatcgatccaactttacacgataaaaaaatggctgaattagaaaacaaccaaaaaattaaagtattattagcgcaaagtttattcggtgaaccagacgtactattgctggatgagcctactaacggtctagatattccagcaatcagttggttagaagatttcttaattaactttgataatactgttatcgtagtatcacatgaccgtcatttcttaaataatgtatgtactcatatcgctgatttagactttggtaaaattaaagtttatgttggtaactatgatttttggtatcaatctagtcagttagctcaaaagatggctcaagaacaaaacaagaaaaaagaagaaaaaatgaaagagttacaagactttattgctcgtttctcagctaacgcttctaaatctaaacaagcaacaagtcgtaaaaaacaacttgaaaaaattgaattagatgatattcaaccatcatcaagaagatatcctttcgttaaattcacgcctgagcgtgagattggtaacgacttattaatcgttcaaaatctctctaaaacaattgacggcgaaaaagtattagataatgtatcattcacaatgaatccaaatgataaagcgattttaattggagatagtgaaattgcaaaaacaacattacttaaaatattagctggcgaaatggaaccagacgaaggttcatttaaatggggtgttactacatcattaagttacttccctaaagataactcagagttctttgagggtgtaaatatgaatctcgttgattggttaagacaatatgctcctgaagatgaacaaacagaaacatttttacgtggtttcttaggtcgtatgttatttagtggtgaagaagttaagaaaaaagctagtgtgctttcaggtggagaaaaagttcgttgtatgctaagtaaaatgatgttatcaagtgcaaacgttcttttacttgatgaaccaacaaaccacttagacttagaaagtattactgcagtcaatgatggtcttaaatcatttaaaggttctatcatctttacttcttatgacttcgaatttatcaacacgattgcaaaccgtgttatcgatttaaataaacaaggcggcgtttcaaaagaaattccatatgaagaatacttgcaagaaatcggcgttttaaaataaatataatatgtagaatttcttttcgaaaatctctgtgttgaggcccggccaacttgcacatttttgtaagttgacttactgtcaccttctatattgggacttattccccaactcgtattgtttgtagaaattaggaatccaatttctctatgcgtggcgccgacaagggttgaaaaaagctagctacaaagtcattttcattcagtcaactactgtcaatataacattgcagggtctagggcattgattcatgtccgagactatattcaatttaatagacattaactgggcgtctcgatgctaatatttatagcatcgaggtgtcctttttattttattttttaacacatcagcatagtgaaccccttctctaaattacaaatacagttatcaacgcattaaaagagtacatttatttaatgtgcatattgagtatgctataagtattttggattttatttttcgaaaagtctcattatcaccaccttttataatataagcaacgctataacttgaattttcaggttattccaaaaaatctaaattatcggtttacattcatatttgtcatatgtataatgaacacataccaatttaataatattttgatgaggcgcatcaatcatgagtaaagtttagattactgtctgctaacagctaatcttgaaagggtgcgatgccgaagcgattataatagcagttataatttgttggactttttggttaagagctgagagtttgtcattatttaaaaataatggagtgcatcacttgtatatagattaagagcaagttcgcattccgaacttgttctttttttattattgtgtgcccttcctaacaattaggaggattatatggtaacaagaagtgtgttgaaatttggcggatcatccgtcagtgattttacaaaaataaaaaggatcgctgaaatgttaaaggagcgggtcaatcaagatgaacaattaattgtcgttgtaagtgctatgggtaacacaacagatcaattaatgacgaatgtatcgacattgactaaaacaccaaaacaacaagaacttgcattattattgacaaccggagagcaacaaactgtatcttatttatcaatggtattaaatgatatcggtgtgaatgccaaagcaatgactggctatcaagcgggtattaaaaccattggccatcatttaaaaagtaaaattgctcaaattaatcctcaaacatttgaacaagcctttcaagaaaacgatattttagtagttgctggatttcaaggcatcaatgaacatcaggaattaacaactttaggcagaggtggttctgatacgaccgctgtggcacttgctgttagtaatcaaataccttgtgaaatttataccgacgttgatggtgtgtatgccactgacccaagacttttaccaaaagctaaacgactagacatcgtctcatatgaagaaatgatggaaatgagcgctttaggtgctggtgtacttgaaacaagaagtgttgaattagctaaaaactataatatccctttatatttaggaaaaactttatcgaacgtgaaaggaacatggattatgtcaaatgaagaaatattagagaaaaaagcagttactggtgtggctttggataaacatatgatgcatgtaacaattagttatcccctacctgacaatcagctacttacacaactatttacggaacttgaagaaggtgctgtaaatgttgatatgatttcacaaatcgtcaacttggatggactacaactatccttcacgattaaagatagtgattttcatcaaatttctatgattcttgaaacattaaagaatcaatatgaagcattagcttataaaatcaatgagcattatgtcaaaatttcattaattggctcaggcatgcgtgatatgtcaggtgtggcatcaaaagcatttttgacattaattgaaaataatatacctttctaccaaacaacaacatctgaaataagtatttcatacgtcattgatgattttaatgggcaacaagcggtagaaaaactatatgacgcatttaacatttaatggtaaaatgattgttaaaatattctaaaaattggaaattattataaaatggagtgacaagttatgacaaaattagcagttgtgggtgcaacaggattagtaggtacaaaaatgttggagacattaaatcgtaaaaatattcctttcgatgaattagtattattttcatcagcacgttctgcagggcaagaagttgaatttcaaggaaaaacatatacagttcaagaattaactgatgctcgtgcaagtgaacatttcgattatgtattaatgagtgctggtggcggtacaagcgaacactttgccccactctttgaaaaagctggtgccatcgttatagacaattcaagtcaatggcgtatggcagaagatattgatttaattgttccggaagtcaatgaacctacatttacaagaggtatcattgccaatccaaactgctctacgattcagtctgttgtacctctaaaagtattgcaagatgcctatggtttaaaacgagtggcatatacaacatatcaagctgtatcaggttcagggatgaaaggtaagaaagatttagctgaaggtgtaaatggtaaagcaccagaagcatatccacatccaatttataataatgtgttaccgcatattgatgtgtttttagaaaacggatatacaaaagaagaacaaaaaatgattgatgagacgagaaaaattttaaatgcgccagacttaaaagtaacagcaacatgcgcacgtgtgcctgttcaagatagtcatagtgttgaaattgatgtaacgcttgacaaagaaacgacagcagaagatattaaagcgttattcgatcaagatgaccgcgttgttttagtagacaatccagagaacaatgaatatccaatggcaatcaattctactaataaagatgaagtatttgttggccgtatacgtagagatgattcattagaaaatactttccatgtatggtgtacatcagacaatttattaaaaggtgctgcattaaatgctgtacaagtattggaacaagttatgcgtttaaaaggagcgaattaaaatgacacatttatttgagggtgttggcgttgcacttacaaccccttttacaaataacaaagttaaccttgaagctttgaaagcacacgttaattttttactagaaaataatgcccaagcaatcatcgttaatggaactactgctgagagccctactttaacaacagatgaaaaagaactcattctaaaaacagttattgatcttgtagataaacgtgttcctgtcatagctggaactggaactaatgatactgaaaagtcaatccaagcttcaatccaagctaaagccttaggggctgatgcaattatgttaattacgccctactacaacaaaacgaatcaacgtggtttagtcaaacactttgaagcgattgcagatgctgtgaaattaccagtcgtgctgtacaatgttccttcaagaacgaacatgacaattgaaccagaaactgtagaaatattaagtcaacatccttctattgtagcattaaaagatgctacgaatgattttgagtatttagaagaagtgaaaaagcgaattgatacaaattcatttgcattatatagtggcaatgatgacaacgtcgtcgaatactatcaacgtggcggtcaaggggttatctctgttattgccaatgtcattcctaaagaatttcaagcgttatacgatgctcaacaaagtggattagatattcaagatcaatttaaaccaattggcacactgttatcagccctatcagttgatattaacccaattcctattaaagctttaacaagttatttaggatttggaaactatgaattacgtttaccattggttagcctagaagatacagatactaaagtgcttcgtgaagcatatgacacatttaaagcgggtgaaaatgagtgaaaatattactaattggctatggtgcaatgaaccaacgtgttgctagactggcagaagaaaaaggtcatgaaatcgttggagttattgaacctacacctaaagaaacaactccatataagcaatatcaacatattgcggatgtaaaggatgcagatgttgcaatagacttttcaaatccaaatcttttattccctttattagatgaagcgtttcatttgccattagttgtggcaacaactggcgagaaggaaaaactacttaataagttagatgagttaagtcaaaatatgcctgtatttttcagtgcaaatatgagttacggtgttcatgcattaactaaaattttagcagctgctgttcccctacttgatgatttcgacatcgaattgactgaggcacatcataataaaaaagtagatgcaccaagtggtacgttagaaaaattatatgacgtgattgtatctttgaaagaaaatgtaactcctgtttatgatagacatgaattaaatgaaaaacgccagccacaagatattggtattcattctattcgtggaggtacgattgtcggtgaacatgaagttctatttgccggcactgatgaaacgattcaaatcacgcatcgtgcacaatcaaaagatatttttgcgaatggtgcaatacaagcagcagaacgcttagttaataaaccaaacggcttttatacgtttgacaacctataaacatattaaaggagatcgattattttatggtacaacatttaacagctgaagaaattattcaatatataagtgatgctaaaaagtctacaccaataaaagtatatttaaatggcaattttgaaggcatcacatatccagaaagttttaaagtatttggttcagaacaatctaaagtaatcttttgtgaagcagatgattggaaacctttttacgaagcatatggtagtcacttcgaagatatagaaattgaaatggatcgtcgcaattctgccattccattaaaagacttaacaaatacgaatgcacgtattgaaccaggtgcatttattagagaacaagctattattgaagatggtgctgtcgttatgatgggcgcaacaattaatattggcgcagtcgttggcgaaggtacgatgattgatatgaatgctactctcggtggtcgtgctacaactggtaaaaatgtacatgtaggggctggcgcagtattagcaggtgtgattgaaccccctagtgcttcaccagttataatcgaggatgatgtattaatcggtgcaaatgcagttattttagaaggtgtacgtgtcggtaaaggtgctattgttgcagctggcgcgattgtgacacaagatgtaccagctggtgcagttgttgctggtacacctgctaaagtgattaagcaagcttctgaagtacaagatactaaaaaagagattgtagcagcattaagaaaactgaatgactagtgacgtcaacgtataataatttcaaggttgagatacgattatgtctcaaccttattgtttatcatcgaataaacttttgatcataaatttcgaaatacgttacactatttatatagtaatttaacacaaaggattgataattatgaatgaattagaatttgttacgaaacatcgccgtcatttacatcaacatcctgaattaagcttacatgaatttgaaacaactgcttatattaaagcgtttttagatagtttaaatattaaatacgattgcccattggaaactggcgtcattgcatacttagaaggtaatggctcacatacgatagcgtatagagctgatattgatgcgttacctattttagaggaaaatgatgtgccttatcgcagtcaatctgatcatgtgatgcatgcttgtggacatgatggtcatacaactgcattaatgctttttgtacaacgttgcaaagacatgcaagatgcgggtcaattaccgcaaaatgtcgttttcattttccaacctgcagaagaaactggtggcggtgcaaatcgattaataaaagccggtgcctttgataagtatccaattgaagcggtttttggtattcatgttaacccatttgctgatgaaggcattgcagtgataagggatgaagaaattacggccagcgcaacagaatatcgctttttcttaacaggcctgtcaagtcatgttgctgataaagaacaaggtcattcttgtggtgaagcattacaacatgtattaactcaaatatcacaaattcaacaatttcaccttaacggtttgaaacgaaatattgttcatattggtcattttaaagctggtgaagcaattaacactgtaccaagtaatggttatttagaaggtacaattcgtacatatgatattgatgatttaacaatcgttaaaaatcaaatgcaaaagatagcagaaagtgtcaagcttctgtttaatgtagactgtgaagttaaatttgcagaaggctatccccctacaatcaatagtccgaaattacgtactcaaatagaggacgccttaataaaagctgatttaaatgtctatgacaaaccaacgccattcttatttggagaagattttagtttttatggtcaacaactagctcctgcttactttgtttttataggaacacgaaatgaagataaaggttttgtaactggtttgcacacatcacatttaaattttgatgaaaaagtgttaataaacgtggcgaatttttacgaaaatttattaaataattacaaagaggtgtaatacattgacagcaacatggtctgtaaataagaaaatatttttacaaaatgcaatcacagtcaaaaacaatcagccattaatggcagttgttaaaaataatgcatatcactatgacctagaatttgctgtaactcagtttatccatgcaggtatagatacatttagcacaacatcactacgagaagcaattcaaattagacaacttgctccagatgcaacaatctttttaatgaatgcagtttacgagtttgatttagtccgtgaacatcaaatacacatgactttgccgtctttgacatattactataaccataaaaatgatttagcaggtattcatgttcacttagaatttgaaaatttattacatcggtctggatttaaagatttaaacgaaattaaagaagtattgaaagatcaccatcataatcaaaatgcaaaaatgattattagtggtttatggactcattttggatatgctgatgaattcgatgtgtcagattataatgttgaacgttcacaatggatggatattgttgaagcacttttatctgaaggttatcagttcgacctaatccatgctcaaaatagtgcgagtttttatcgggaaggacaaatattactaccccaccatacacatgcgcgtgtaggtattgcgttatacggttcaagaccatatagttcactgaatcaacatgatatagttcagtcattgactgtaaaagcacatgttattcaagtgcgcgaagtacaagctggtgattattgcggttatagctttgcctttgaagtgactaaaaacaatacaaaattagctgtagttgatatcggttatggcgatggaattttaagaactcgtgctaaacatgaagcacttatcaatggcaaacgatacccaatacgtgcattaatgatgagtcatatgtttgttgaagttgatgacaatgtacatgcacaagatgacgttattctttataataatgatatacgcattgacgaatacacttttaaaggtgtaggtgcaaattcagaacaattaagtgcaatgaatcacgattctttaaaaaaggagtacatttcaaatgactgttaaatataatcaaaacggtgaattaacaatggacggcataagtttaaaaacgattgcgcaaagcttcggtacacctaccattgtttatgatgaattacaaattagagaacaaatgcgtcgttatcatcacgcatttaaagaaagtggcttaaaatataatatctcatatgcttcaaaagcatttacttgccttcaaatggtcaaacttgtagctgaagaagatttacaactagatgttgtttccgaaggcgaattatacacggcattagaagcaggctttgaaccaagtcgtattcattttcacggtaacaataaaacaaagcatgaaattagatatgctttagaaaataaaatcggatattttgtgattgattctttagaagaaattgatttaattgatcgatatgccaatgatacggttcaagtagttatacgtgtgaacccaggggttgaagcacatacacatgaatttatacaaactggacaagaagatagtaagtttggattatcaattcaatatggcttagccaaaacagcaattgaaaaagtcctacaatccaaacatttaaaattaaaaggtgttcattgtcatattggttcacaaattgaaggaacagaggcatttatcgaaactgctaaaatcgtattacattggttaaaagaacacaacattcaagtcgatttattgaatcttggtggcggctttggtattaaatatgtcgaaggtgatgaaagtttccctatcgaaaaaggtattaaagaaattacagatgcgattaaatctgaagtacagcttcttgatattgaacccccagaattaggtattgaaccaggtcgttcaattgttggtgaagccggtgtcactttatatgaagtcggaacaataaaagaaattcctggagttaataaatacgtttcaattgatggtggtatgagtgaccatatcagaactgcactttatgatgcgaaatatcaggcattattagttaacagaaacgaagattcagatgatacggttactattgcaggaaaattatgtgaatctggagatatcattattaaagacgctaaattaccttcatcagtcaaacgtggagactatcttgctatattatcaactggtgcatatcattactctatggcatccaattacaaccaaatgcagaagccatccgttttcttcttgaaagacggtaaggcacgtgaagtcgtaaaacgtcagtcgttaagacaacttatcattaacgatacgaaataatccataaaataaatcccctaacctcagtgaaaactgtgacttggggattttttagttattattaaatgattgttaaattataaataaggataaatttctttcattacgtcagctactgctttactacttgaattatgctcatcttcgagatttttaataatgttgttgtaatcttgttcatttcgattttgactcattttgtatgcagcttctatcttttttattttgactttaaatccaacgattgccttggcctgcatttgcgtattttctgcaagattatcccataaaactggattttcacgattttgttcatactttgttagtaacgttttcaaaccatctatcgtttcttgttcgttcaatacggttgcttccccatacaaatgaactgcctgatagttccaagttggtacattttccttttcataccatgatgatgaaacataagcatgtgcgccttgatatataatcaacacattgccgttcccgtttaaagtcttccattgcggatttcctttggcaatatgtccactaatataataatcatcaccatttttctgaaaaattaatggtaaatgagtagctaatggctttccttgatcctcagttacaatcattccaaaagaattgctttgtataaattgctcgatttctttaaaatcatttacttgaaagaacttgggtatatacatctaatcccccctctgttatgaccttgattatacagtgaaaatttaataataaacaatcatgtgatataagaattcagcaataacttgtatttcaaccaattttaaagtcgtattttattcatgattaagctttgcccttaacttgcttctttaaataatataaaacgataagaattaacaacaaatataatgtataaaacagaatttcatcaaatccaaaatctttacttgtaattaatacatcaatatcttctaattccatcatctctgatttgatataactattaaatcttggtaaggccattaaatgtacattgtaaatatagtaataaaagtctataaaaagtatgttaaaaaatatgtatgtcttatctaaattagttttaaagaataatattcctgatatcgtaattggaataactagaatcatcatcattgctgctaaaatattaatatttaaaccaattgcagataatacaccgaaaactaataaattagcaactaaactaaggataagatatttcataaaatcacctcgtcgttgtacaccataattatattatataaatataattttctattgcaaacaatgttggtgatataaaaaaagagttctcaatttggttgagaaactcatcgcgttaagtatttgtaataagcatataaaaacaccttacttcttggtaaggtgttagttaaaatcaatgattcaaatctaagaattatagtttaacaacgtttgcagcttgtggaccgcggtcgccttcaactacttcaaactcaacagcttgaccttcttctaatgatttgtaaccatcttggttaattgctgaaaaatgaacgaatacgtcattttctccttcaacttcgataaagccgaatcctttttcagcgttaaaccatttaactgtaccttgtttcataatctgaaacctccaagactaaaattcattcaatatgcttattcgcatattacaaaaaatacatgcaaatttcactcaaatattctttgcaatatggaataatcatctgcttaacttgtattatagtgcagttattaccaaattgcaatacaataataaaaaatattcatttaatcaattattggtagtttataatatacttcattattttgtaaaacaatgaaactataaaatatttgtaaatcctcttcacaatcttcgcaatagttcatgtcacaattattataaaatgcataaatattatatttgcctgtgacataattatcgaactgaactttacattgattaatcaattgttgatagtgcttaaacatgtcatcaaaatcttgatattgatatttttcaacaatgttttctggccagtcactgaataaccaccatccctcataatcggctctaattttggtaactgtccacattattaaagaccccttccatacttcaaaaactctatacttatttttatacctttatcctctgaaaatcaagtttgacgacttgaaacaaacaaagtagtaactatagtaattattagtttttttaagtaaaactacgtataataacattatgaggtggtaaaaatgagacatatacatttacaagtattcggacgcgttcaaggcgtcggatttagatattttacacaacgcattgcaatgaactataacattgtcggtactgttcaaaatgtagatgactatgtagagatatatgcacaaggggatgacgcagttatagagagatttattcaaggtgtaattgaaggtgcctcaccagcatccaatgtaacaagccatcaacttgaagagttagaactaaatcaaaaattatcggattttcgatcaatataaaatgctaaataaaggaagatgacagtgagatataatatttctcatatatttggggtgttagtgggaattcctgtagcgtttttaacaagcatatttgggatgattgcacttgatgtatcttttttaattgatatgtctattggtattgttggctttttaatgacatacctaccgatacaaaaactcacttcacgcaaatatttaaacgaaattggtttgactagaaaagactatcgctatattcgaaatcagttaaatcatacacaccaaaaacttagaggtattttaaaaacgtatgtcaatataagatcaattaaagattttaggcatattaatgatatataccaaatttcacgttctatttatacgacagttagacagagacctgcatcattttataaagttgaagggtttttttattctcatattgataatgctttaaatttggttgatgcatatacacgtctagcaaaaatgcccaaaaaatcaattaatgaacagcaaaaattagaacaaacacgaattactttggatgaggtcaaacgaacattaatcgctgatttaaagcgtctcaacgaagatgattatgaacgtttagatattgaaatggaattaaataagttacatcaaaagcatcatcaagattgatgtaaaatagcaactattggagagatgattgatgactgaaaataaaagtttcaaagaaagccatccactagatgattttataagcgataaagaattatcgaatactactatccaaaaagaaaagttaacaattgaacaacaaaagcaggtagacacaatcagtaaacaaattaaccctttagacaatgaaggtttattagcgtttggttctgatttacagaaacaaatgtctcaattttcacatcaaatgttggatgaagtacaaagtaaagatgttggtcctattggagatactttgtcagatctcatgtcaaaactaaagtcagttaatccaaatgagttaaatactgataaaccatctatgttaaaaagaatttttagcagagcaaagtcgtctatcaatgaaatcttttcaagaatgcaatcagttagtgctcaagtcgatcgcataacgattcaactgcagaaacatcaaacacatttaacaagagatattgaattattagatacgctatatgataaaaacaaacaatactttgatgacttatcattgcatatcattgctgcacagcaaaaaaagttgcaattagaaaatgaaaagctaccacaattgcaacagcaagcgcagcaatccactaatcaaatggatattcaacaagttgcagatatgcagcaatttatagatagactagataaacgcatatatgacttacagctttcaagacaaatagctttgcaaactgcgccacaaattcgtatgattcaaaatgttaatcaagcacttgctgagaagatacaaagttcaattttgacaagtattccactatggaaaaatcaaatggccattgcgcttacattaatgagacagcgtaatgcagttgctgcacaacgagctgtcactgatacaactaatgaattattaacagcaaatgctgaaatgttgaaacaaaatgcaattaaaactgcaacagaaaatgagcgtggcattgttgaccttgatacattgaaacgtacacagcgtaacattattgagacaattgaagaaacattaattattcaacaacacggtcgcgaagaacgacaattagctgaaaaagaattacaacaattagaacaagatttaaagtcacatttagtgaatatcaaaggaccgaataaacaatcataaattacgaattagatataacaaaaaggaagcatcctacgattaaattggagatgcttccttttttgttattcctgttgatatttaattggatcttgttttacaaatatgccgactagatagcctaatatcgttgcaataattgctactgggaaccactctaaagaatacgctcttagaggcaatgattctataaagttaattttcagccaacctaacttactaataacactgaaaattgacaatataaatacgataataactggaatttgttgtgaaatgcgttttgtcggtatgaatttggcaattaaaattaataatacaacagttattgctactgggtatacaatacttaataccggaattgacattgagataacagcatttaaaccttggttagcaataataaaactcattaaaatgaaaactaatacaaatgctttgtatgatactttaggtacgattctatggaaatattcagaaactgcaacaataagcccacatgctgtagttagacatgccagcgctacaatgatgcccaataaatactttccgaatgaaccaaatcctgttgaagccattgtcgttaataaatatgtcccaatgtttcgatctttggatttcaattgatctaacgtcatgtcacttactggcatatgattaccaatataacctaatgaaatatatatgaaaattaaagcaacagctgcaattaaaccagcagtcaaagtttgtttgaatatttgatttgttttagtaatacctgttagttttactgcattaacaacaatcattgaaaaagcaattgctgcaatggcatccattgttaaatagccttgtgtaaagccttcagcaaaacttgaaaaattagaatgatatagtgcttcattgccctttccagcactattaccgctaaagtctaagtatcctttaataatcatcgctaaaatagtaatcaataataatggtgttaataatgaaccaatacgatcgattaacttagatggatttaaacaaatatacaaaacgactatgaagtagataatcgtaaatataaataaagcgatactactattgctatgtataattggtgtaattgtcatttcaaaagatgtagatgcagttctaggtattgcgaaaagtggccctatagtcaaataaatgatgattaagaacaatattgaaaatttaggtgaaattttatttaatgcgccaatatatccttctttatcaagtgcacctacaatcacacctaataatggtaaaccaatcccagttagaacaaacgctaaaatggcgggccagaaaaattgaccactatccaatccgagattaggaggaaaaattagattgcctgcgccaaaaaacatagcgaagagcgtaaacccaatgacccatgtatttttattcatagagttactcctttttttaaaacacgaaataatttacaagtaaatattttagcacaaaaaataataaagagtctatatgaaatatgttgtacatagcagaaacaaaacacatgtgttgtttaaatcaaattatgccagaaaataaaaatcttcaaattcactttttaaatagtaactgatgacttttattcacaatttcatataaactcttattttaaactgatttataaagatttaagtagtaatttttttaataatggagagagatgtccaggtaaatgcgcaacaccttcaacgaaaatggcatattgaccataaatattatgaattgtttgttcaacatcttcagttattggatcttgacttaaaaatacattaaatacttcaatgccaaatttacgtgacatttctacagcttcatacgtatcaataataccatcttgactataattaaatgcagacggttcgccgtcagaaaatacgattaaaaatcgttgatgttgatttcgacgcattaatcgttcacttgcaactctaatagcaacaccatcacgattatcatcttgaggttcaagtgccataatacgtgggccatctttttcaaaggttgagtaatcatagttaataatttcattaatgatatttggttgtgcatgctcgtctgaatcaaaggcatcctcactgaatgataaaatttcatgtttaatgttcaatgcttttaacgtctcgtggaataacactacacctttcttcgtttcagccattttatcatgcatacttgctgacgcatcaattaacaatgtaaacgtcgcatcaaatgatttacttaaatcttgttttttgtaaaacaatttatactgatcgtcgataaaccaattaattaaatccttttgtaatcgcccttttgttaaattaaaacgtgcatctcgttgttctcgttcaatcgttttctttataatttgaattaagtctttgatttcatattgtacgtcttgtttcgattcttgatattctaaaacatattgtggttcaatttcaggaatttgccattttatttctacatttttgttcacaccatcaagttgaaatgcctggctttgaccaacagcatcgccttcttcacgatttagcgtatcgtttgatcctttgccctttttggtcatcatatcagtcatatcgtctgtagcatcgccttcacgtgcttcatcattacctaatgtttcactattttgtccttcgtgaagctccatttctaaataggcgccaccttttgactcactatctgcagatttagagtcagctttttcactttcgttttcatcatcttctgaagtatcatcttgcccatcgacttgacttgcatcagttctctttaaatcttcaaaatctggactagctaatgtattatatagtgttttaggtaagtaataatattcgtttagcatatcttcttttaaaatatcatctacttgatacataattctttgagccagatacatattatcttcagaattttgattttggaaaaaattaggtaaatataagaacatattaactaaaatatcatctaaatctgaatgtatagatggtatatcaaagaaatcttgacttaaaaatgcatgttctaaatacaaaaataataaatctgtatattgtgttttagtacgatacactttaatttgagattccgtatatgatatccgtgtatctaagcgaagatcaattaatttagcagtacttgggcgcttaactttaatagaatttaatacgcgcatatcttctaataatttaaaaagttgttgataaaatttagggtgtttaaaggttttatcttgtactacttcatttacaatttgtacatccatcatatgataaccgtaagcagctaacataacatctgtttttaaaccagccatttcgatatggcttggtcgatgtgaccaaaaccaactcgtaatcaaaacattttgaacaggattatagtaagggaatttttggattttaacttgtgtttgttcattttttaataagagtcgagctaagtcttgcaacatcattacttgcttggcatctaactgttcgtcgttaaattttatgaaacgatcactcatgttttatccctctttaaaagtttagttctacagcattatatattgcttgttgttcacgttcatcttccaatttatcaataattgtacgtttaattgcacgttcaactggcattacagtgattaaatcacacaagtctaataatgcacggatactagcggcttcttcagaaatttgtccctgcttagacatagtacgtaaatcttcgttaaacttaataatttgttcgatttgtttatcatcttgtaataaactttgctctttaatcacattttttaaaatgtccccgtcaatatagtcaacgtgaataacaacaaagcgattttttagtgcttcattcattggcaatgtaccaacataaccttcatttatcgctgctataacgttaaatcctggtacagctttgattacttcgccagtgtaaggattcgtaatttgacgacgataatctaagacaccatttaatacaggcaatgtttcaggtttagccatatttatttcatcaatatataaaatatggccctctttcatagctttaataactgggccatctacaaagacaatttcttgttgtccttccgcatttgttttaattgttttaaagcctaataagctttctgtatctaaatcaacagaacagttgacttgatgcatgggtgtatcaacaacttcacttaatgtttctgccaacttcgttttccctgaacctgttggacctttaagtaaaatatttttatttaaatcgaataatgccttcgcatcattgaaaactgttgaatctgaattcttataatgttttagtgccattttaaaacgttctcctttaaataaattaaaaaactaagacatggaaaaagttctccaaatgccttagtttactattctattctgatataaaacgcaatgcttagtatgcgaattgtttatattttaccaaatttactaattgaaaatctcatattaggattcatttcaataattatgcgtttaaacttctttgaaatatgttttatagtaaccgccaactaatccagaattgtcgataatttgataatattcttctgtttcattgataacgtcatattgattgccaaccgttaacatgtcagaaactgtaaatttcttcgcatctgtattaatcacttcgactttcttgattggcgtacgttctttccaagtttcatgtaacatataattcttcctcactatcgtaaataattatttttgtaaagtgaatataaaagataatccactgttttcagtaattctaattgattcaatatcgtcttgttcaagtgtttgatatggtatttccacttcatctaagcgcgatttcgcttgattaaagaaatctacatctttcgtttcaaactcaacttgatcgactgcgccatattccggcattgtcatttcggtttctacaggcattaaatgtatttcgccacctagaccacccgttccaattttgaatacttggacatgatagtcagcattgtcgaagggttggtattctgcaaatatttcaagtccgaatatgtttgttaaaatttgacctgtaatatctacatgattcactttaagaatcactggccctaaaccttgaacttgatgtaacggattgaccgcactttcgaaagaaggcatacctaaaccaacaccataattattctcgtttgaatatattgagaaaatatgaccattgttatcttcgagactgaaatatttattgccatttaattctttaactgttgtaaatggaatatccttactcgataatatttccgcatactcctctaaacctgagtcggttggtgtacgtaatccaatacccacaaagtgagattcttctaattgctcacttggaacttgtataaattgaagtcttgttcctgggcttatatctgcatcgccgaaacgaattgagttttcaagaagttcttcacaatttaatcctaatatgtcaaccatgaaatgttttgtctgttctatatttgttgtacctaatgttatacttctaagtccacacattatagccacctctatctttatctttactattatattataacttattttaatcataaattatagaatatcggccagttgattttgattatagattaatatgtgaaaaatgtatttctttaaaagaactatttcatttaaataggtaacataatattgttatggttgaattttgtgttatatgcatttgtctattaatatttaaaacaatatgaatctaaattgtatagtcaatcaactaggttctcattttcagtttataatcgaacaaaacaatttaagttaactcaataaacataatttcatgtttataaaggtatttaattatataatcatttctagttgtttcaaaatactgtattaacatttcaaattcaaaccatacctatggttaaaattaaattcatcattttcttat

SEQ ID NO: 11 - DNA, 2850503 bp, Staphylococcus aureus CA-347 (residues 1,425,253-2,850,503 of 2,850,503)
tttctttgaagttcatacttttatatttcagcaaacttatcatcaaaatttgtgactatataattttctgctatataatacgcacgtccaacacaaatataaggattattcacaaataacgttaagtattttgtttcttttaaaatttcctcaccttttttagttggtatatatacatatgacaaagctaaattattaaatatgagataattatcatctatgcgtttaacaagttctggcttagtacctgttgttgtcaacgcaattttctttgaaatctgctttaactcagagattgttttttatatgttaccattaaattcattagtagttgttaataagttagcatcaaccaagattttcatctagtgcataattctaacaccattgtaatcaagataattattgggtaatatttctttaactacaaccctatatacatttttatgtaaaactaataaatcatatgaacttacattcattaaactttttctcctcataataatcttaactgtcaataaataatcaatccatctcatgatattcgatatcccctaaatataaacgtctatgaataccatttttgattataatatttttcaaattccgccgagtaatcttcccacaattttttatcatttaaaaataaactactacatttcaagaactcactaactatatagtttgtaaaagaagaaatttctatttcactcgttaaaggttcttcatttagtagttcttctatttctccatttctaatagcaatatttttaccaaaaaatcttatagtatcattaattatactgtcagttgaatgcacatctttacaaaagattttataaatatgtttatattgataattcatattcaagtattctgataattcgtataaatttccagtttttgtacaatcattagatttttccatataccaagcttttatgtccttgaatttgtttacttttatattagaatttataaaactatctacatatgacttctcaatatgcttcttttccatttttaacttatttaaagtttgttcatcaaatgtactgtcttttccatttgatattaataaatcgattttttgataatttttatataaaaaataccttttagccctaatattagactcttcttgatattccaaaatgtattttaattgaagtaataattcgtatgattttctaactaatgtccgagtactgcttatagttatacaattatttatatctatatagttaagataaaatgaatgaacaatttcgtaaacagataaaaaaagataattttctttaaactcttctatgtcgttgtcagtagttaattttttattaatatgtccctctattaaattaattaattttatcaaatcgaaattcttaaaaaaaagcttttccaatataaacaagtcctttaattttatttaatattaactaatactctcttcttaaaatcgtacacaaaattcatttaacattgttcaaattaaaatataataggccaattaagacagcttccttgctatacaaataaatacaatacgaagcattgtgaaaataaagtacagcagtaagttatttcgactagaaaataatcttactgctgtttgttattgatttgatcccgtttttaggaatcgtaaactaatttgtgttgtgtattaagattctaataataagtcttctgggttttcaattaattctttaattgtttttaagaatccaactgcttctttaccgtcaataattctatgatcatagcttaatgcaatatacatcattggacgattttcgattgtatcttgatcaatcgcaattggtcttgtaataattgaatgcatgcctaagattgcagcttgattaccattgataattggcgtactcatcattgatccgaaaataccgccatttgtaatcgtaaatgaaccattaaccatatcatctaagccaagttttttctctcgtgctttaacagctaaattagcaatttctgcttcgatttctgcaaaattctttttatcacaatctcttacgaatggtactaatagtccatcatctgtagaaacagctacaccaatatcataatattgtttcgtaatcatgtcgtcgccgtcgatttctgcattaacttctggatactttttcaaagctgctacagaagctttagtaaagaatgacataaatcctaatttagtaccatcatgatctttcataaattgttctttcttacgtttacgcaattccataacatttgtcatgtcaacttcgttaaatgttgttagcatagctgtattattagatacctctaataattttttagcagctgttttctttctgcgtgacattttttcacgaatcactggttttgtaggatattgattgtattttttctcttcttttgcaggtgcttgttgtgacgttggtgttgatgcaggcgcctgttgtttcttatcaatatcttctttacgaaccacatcatttgttttcggacttacttcagcaagattcactccgttttcacgagcataacgacgcgcagaaggtgtagcattaacacgctgctgattgtcatcatttgtttgattgacttcagctttatctgccgatttatttgttgtttcttcttttttattatttgttgtttcatcattttgttgtggagtattgtcgttactattttctttagaagcattgccactaccttcgccgatgacagcaattgcttgtccaacttctacagtgtcgccttcacttgcaagttgttcagataatacacctgcttcttcagatacaacttcgacattaactttatcagtttctaattcaagaatagcttcacctttttctacgctatcccctacgtttttcaaccattctgcaatggtaccttctgtaatagattctgctaattctggaactttaacctctggcatgacttatttccccctagttattttttaatgcattttctataattttattttgaacaagtttatgaatttctccatcgccttcagctggagcagccctttgaattctgccatgataacttaaatcatatttatctgcaactagcactttaacatatggataaacatataaccatgcaccttggtttttaggttcttcttgtacccatgacacttcttcaaggtttggcaattgtgctagtaatgcttcaatctcttcctctgggaatggatacaatctttcaatcgcaacgagtaatactgattcgtctggatttttggctaatgcttcttttaaatcaatgaacattttaccagttgccaaaataacttttgtaactttatccgcttgatatgactctgtcaaaattggctcaaatccaccagaagtaaattcatcaattggttttgcaactgttttatttctcagtaagctttttggtgacataacaaccaatggtcgcatttgttcagaatctaaactagctgcttgtgcacgcaataagtggaaataattacttgaactagataagttgacaactgtgcaattattttcagcagctaattgtaaaaatctctctaatcttgctgaagaatgttcaggcccttgaccctcatatgcatgaggtaagaataatgttaatcctgaacgttctccccattttgagcgagaactgaataagaagttgtcaaaaatcatttgtgacatatttgcaaaatcaccatattgcgcttcccaaatattgaagctttttttgttttccacattatagccgtattcaaaacctactactgctgcttctgaaagcggagaattgtgtatatcaaatgtcgctttttgatcaggaacatgatgtaaaggtgtatatgtttcacctgtttgttcatcatgtaacacggcatgcctatgactgaatgtaccacgttcactatcttgaccagttaagcgaatcggtgtaccatcttgtaaaattgtcgcaaatgcaagttgttctgcttgtgcccaatcaactaaaccatcttctttattaaatggctcatgacgcttctcaagaactttgtttaactttttcaaaatgttaaagccatccggatatgttaacaatgcatcatttatttctttcaaatgatcaaacgtaaatgattgttcgtctgcttgtaacggtaatgcaagttctgcaggtttttccatatctggattatccattttatcagctttattaattttatcatgtgcttgtcttagttccttttggacttgttctataaatgaatgcatttcatcttctgaaatgataccttcattaacaagctttttaccaaacacatattcaacagagtcatgtttgcgaatattctgataaggaactggattagtaattgatggttcatccatttcgttatgtccgaaacgacgataacctactaaatcaataacgacgtctttatgaaactcttttctaaattccattgcaatatcaattgcttcaatagtagcttcaacgtcatctgcattgacatggaatattggcacatcataacctttagccacatctgtagaataagttgttgaacgtgcatcaattggttctgtagtaaatccaattctattgttagtaataatatgcaatgaaccacccgtagaatagcctttcaagtttcctaagttcattgtttcgaagttaattccttgaccaggataagcagcatcgccatgtataataattggcattgctttatggtgatcagtcgtcggagcgccagcacgttgtgtatcatcttgtgctgctctcgtacgcccttcaacaacaggtgcaacaatttccaagtgacttggattgttagccagtgcaatacgctgcattgtaccgtatgaatcagtagttttaatgccaccaaggtgatatttcacatcaccagtccatccagcagttaattgcaagctaccatcttcaggtaagaatttcattggatctgtatgcataaattctgaaatcatcatttcgtacggtttttctaagacatgcgttaaaacgtttaaacgtccacggtgagccatgcctatttgtatatttttaataccttctttcgcagcaatcgtaatagtacgttgtaacatcggtacaagtgcgtctaccccttcaattgaaaaacgcttagcaccaacgaagtttttatgaagatatttttcaaacccttcaacatacgctaattgtttgaatagtgcccttttttcgttattatttaacgttactttatatggcgtttcaattcttctttttaaccaaccacgttcggtattgttattaatatgtgtatactcaaatgcaattggtcctttgtaacgtttttccattcttaaaattgcttcataagcattatcataaatgtcggcaaagtgatctgaaacaattcctgctgatataccttccaaagtctgttgatctaaatcaaagtcttcaatctctaatttaggtacatgtttccttttcggaggatttacaggataaatatcggctttaagatgcccgtattggcgaatattatcaattaaacgcatgacacgcttaattgtgccgtcactattttgactacttgtactttttaaagctggtacaattgagtcatcattcttaattgtgctgaataagacttgtaaatcttctggtacagacgatggatcttgtaaaaagtcatcatatagatctaacattagacctaaattcgcaccgaagtttacaggagcctctgaaacttcttttctttcgttagtcattttacaccctccacaaaaatgttgaaacgcttacaatgtaataatatcactatttagttatttgttaaagtagatttacctatttatctgctaaaaagaagaatcaacaaaagcgttgattcttctaggtttatagatttattttattgtaaattttgggagtacaacagaaatgataaagaacccctgattatttgttttatagtcgttcatatacattagtcacagctaatgtgtgcttaaaaaattgattctatgactttgattgacgtcttaaacatgattaaaatatgattttaaacgttgttcctttgttaatttcacttttaattttaatcgatccaccgtttaattgaatgattttttgcgcaatagataatccgagtccattaccgccttgacttcttgaacgagatttatccactcgataaaagcgatcaaaaatgaaatcttgatcttcctctggaataccaattccatgatctgtaatttcaattattttttgcttattttttaaccttgtcttaactttaattttcttattcttcacatcatatttgattgcattatcaataaagattaaaaataattgttcgaattgatgaggtttcattttaatttctagatttttagatgtcagatccgtatcaaattgataatctggatgcaattgttttaatgagtgtattcgcgagcgaatttcatcattaatatgcacggtctgcgcttcagaagaaatgtcatttacatctcctttagtcaattcaagtaattcttcgactaattttatgatacgattcatttcttcaatagaaatatttaacgattcttctaatactgctgggtctttttttccccatcgctgaatcaaatttaaatgaccttgaataatttgtaatggtgttcgtaattcatgtgacgcatcttcaacaaattgtctttgttgattaaatgattcttcaatttgactcatcatctcattaaacgtatttgctaaattatctatttcttcataatttgtatttaattgcaatttattttgaaaaccatctcgtcgaatctcaatcattttatttgataaactgacaagcggtttagtaatttgagttgaaaatacataactgattgtagcagttataattgttgcaatcactccaaatgcaagcgcaatgatatacaatgattttacgatgttatcataattttctagtgaatgaattaacaagctataccctttgaaatcttgcgttgtgattggttctttaataattaaataatcaatgcctttataacgtttttttattacgcggtcaaaataccggtgttcataacctggttcaactctcactgtgttatcattcgatgtctcaaataatttattattatgctcatcataaataataatctcttgaaaattacctaaagatgcattcaagtctaatgcagatatatctttaacaggcttagaatgaaataaattattaatatcgcttgagcttctttctgcatcatcaagctcactattatgcagtgtatctttcaagaaaaagataataattaagcaaaacaaaaatatcgtgacaaacgtaatcatcgtggtaacaataatccagttattgcgcaatttacgttttgtcatcgtatcacatacccaacgccacgaactgtttcaatcattttgtcacgatcgtatggttttaatttgtttcgtaaatatcttatataaacatctacgacatttgtttctacttcactattataaccccatacatgatttaaaatttgttcacgttgcataacatggtttttattttcagctagaagatatagtaaatcatactctgtttttgttaattcaatttctgcgccatttaccgtcactttaaaagcattcttatcaattgtaataccgttgacatcgataatatctttttgtggctgacgacgtaaaatagcacgaattcttgctaaaagttcttcaatatcaaatggcttaactatataatcgtctgcaccgtaatcaagcccagcaactttgtcatacgtatcacttttcgctgtaattataatgataggtgtagattgctgttgtctaattttgcgacaaatttctaagccattaattgacggcaacattaaatctaatatgattaaatcatagtaatggctaagcgctttatctaaaccgtcttgtccatcatactctgtgtccacattgtaattttcatgtgtgagttccaattcaagaaatcttgctaagttttgttcatcttctactattaaaatttgcgtcatttgtacacctcatattacgactttttctaataaggtaatatattttaaattttgtatttttctatacaatagttactttttaaattagtttgtttacgtttaaattttatcacaaatcaataaccatgttttaaatttttcaagctacaatcattaattatttattaactcaaatatttaataatcagttaatggaattctgttaattctgattgcagtacttaaatatagaatactttaacacaaggccttaccgcaatatcaattgttgtcgtatactgacttttattaatgtaaaatgaatagttattatctttattttcacaaaatgaccgtagtttaaacatttatcacacatcatttcaatgtgctattttgaacttgcaagtaacatttcataatgtatgaattcaaaagaagtatgtaacaatataatttttaagcctcatcacttttaaatattctaattctaatgagaaatacaaatttttttattttcaaaaatagcgtaatcatgcgttttatttactattcttaaaaattattcaaaaaaagttttagtttctaattgacaatgattctcactaatgtataatagtagttgaaaatgattatcaataccacatagaacatccccccacaacgtttcgttcttgttggattggtcattttcaaatattccccttttatatgcccgtaaaagacaatatacgttataacaacgttttataaaagcagtaaacccttacgacactttaggtttactgcttttgtttttttactatttaattgattaatttatttctaagtaataacgttgataaaataatgcaaaatacgccaccaataatgccggcaataatatctgttggataatgtacacctagatatacacgtgatatggaaatcaataaaatcatagctgcacataaccctataagaataccttttgaattaccttgatttaatcgatttaataaatagataccacttccaaaatatgcagttgatcccatagcatgaccgctaggaaaactaaatcctgttatatcaattaaacgcagcaatgtaggtctttctctatcgaatatattttttaatgctggattcaaaattccagataatgccattgttaatgcaaaaaataatgcttcaattttgtggcgctttaacatgagatatgccacaagaagtaatgaaatacataacattgcccagacttcacctactttagtagccccaagcatgatagatgtcgtaataaagctctctgatgaatatataaattcataaacttcattatcaatccatttccctagtcttgattcgtggaaaaacgcgataattccaaaaaccaatgtaaaaacgatgagcaaagagatacgtttccattgactcataaagcattaccccccattaattcaatgcgtctttaatcatcttatcaaataaagcttctttcgtataactttgttcatacgatttcatattattgataattcgagttctttcctgttccattttatttagctcttgtaataaaatttgtgctgttaattgttcttcatcaatcgttttagcataacctttatcagcaaaatgatttgcattgtcaatttggtcgcctcgggattgatctaaacctaatggtactaataacattggtatacgtaatgttaagaactcataaatcgcatttgaccctgctctacttattactgtgtccgtaattgctaataaatctgttaaatcctctttaacaaattcatattgtatatatcctgattttttaacttgagcatcttttaatcctttaccagttaaatgtatcacttgatattgttgtaataatgcatctaagttttcgcgaataatgctatttaattttttacttcctaagcttccacccataacgagtaacacttttttattttcattaaagcctgttaattgataaccattatgtgcattaccattttttaaatcttctcgaattgttgctccaataaaatcagctttctctttaggtaggtagtttagcgtttcttcaaatgttgtatatattttcttggcaaatttaagtgctatcttattcgctagtcctggtgttaagtcagattcatgaataatagttggtatatttaatgatttggctgcaataacaacaggcacagatacaaatccaccttttgaaaataatagatcaggtttttcttttttcaaaactttacgagcatcaagaatacctttcaatactttaaatacgtctttggcattttctaaagaaatatatcttcttaatttaccactcgaaataggataatacttaatttctggtagttgtgattcaatcatttctctttcaataccatttttagaaccaatataaagcgcttcataaccttgtgataatgcagttggaattaaacttaaatttactgatacgtgtccaactgttccccctccggtaaatgcgattttcgtcattaatattacctctattcttttaaatttttataatatgcataaaatggttcacctttatcatatggcggatattccattaattgttcaccgaccttatgaaatccaaatttggcaaataaaccttgtgcaggtttgtttaacgcaaaggtgtccgttaaaataacttctgcaccacgtgctttaactaaatcaataacataattgaataattctgtagcagctcctttatattctttcgaaccagttaatcgatgaataacaaaagcgccttctctatttactggccagtcaatgtcatcataccattctgcttggtcttggtcgacaacaataaagccataaattttgttattttcctctaatacgtacaaataatctttagcaatatcttcttcaaaatgttctaaaagagggtactgatcgtcccattgctcgttgtcgtgttctttcattaattcttttgcttcttctactagatttaagatttgatctaaatctgacattttacctagacggatcatgtacgtcactccttatatcgttatgttaaacatgtttttcagtacatgttaatcttacacactattagcatgctttaaacctttattatgaatgaaaaatagtaattatcacactatgggataaaaataaccaataaaagtatcatatactaattaattgattgttaaaactagtgaataatactatttaaaaagtatatgctcatagtatattaaagcatgaattattaacagcgatgatagaaattgcgttatttacatcattatgtaaatgtctaatttatatcttttagagttagacgtcaataaaaataaacacgcctcttaaattgctttctttgcaaatttaagaagcgtgtcattaacataataataatacaattttagtagtgtgtatcgcctattttaaaatattaatcaatttatcgagaacatcatcatgtttattagctttttcaactaataactcagtaaatttattattcgtttctttattaaattcaccagttacctcgagtttattcgcttgttggaaagctttaacttgattttctaatgcttgatcaaattgcgttgattcattatcaactttataacctaaagctgataaaccaattttaatagttttaatatttttatcatcgtctccaactttaaatgttttcgtattaggaatgacatttaaagattgatatttaggtgtgtcaataggaacgtctggtttaatgcctttaccgtgaatataatgaccatctggcgttaaccatttcatttcagtatattttaacaacgaaccatctttaaactctcttgtagtttgaacgacacctttgccgaatgtttttgacccataaactttagctttattatagtcctttagcgcacccgtaaacacttcagaagcgctagctgaaccttcattcactaagatggatatatccatgtctttcgcttcttttaacgcatcattagaagtttgaattgcttcagtatctttacctttttctagtttaacaacagtttttcctttatcgataaaaatatttgccattttaacagcttcatctagtagtccacctggattatttcttaaatctaaaacaatctttttcaaaccatctttgtgagctttaagaactgcatctttcaattcacctgatgtatcattctggaatttattaatagtaataacgccaaccttaccttttttcttatactcaacgcttttaacatgaattttttcacgtttaatcttaacgtctttttcttcactgcctctttgaacagttaaagttacttcagtgttttctttaccgcgaacgtctttgacaacttcgtctaatgcttttcctttaattgattttccatttactttagtaatgacatctttaggacgaatgccagcacgttctgctggagaacccttcatagggctagtaaccataatttgatcatttttcttttgcatttctgcaccaatacctacaaaatcacctgaaacaccttcattaaaggatttcgtttgttcttttgttaaatattcagaataaggatcttttaattctttgaccatgccatcaattgcagctttactcaacttgtcagagttctgttttttataataatcactatttaagattttatacacattttcaattttatttaagtttgcttgatcagttttgtttaaaccacttattttttgatttataaaaatatatgcaacaactgtgatgacagctgttattaggattgtaccaattaaaattgatatgaaatgccaacgttttaagtgaacgcgtttcgatgaattagtttgttggtcttgattgcttgttgcaatttcagtgcgttcatcatcggatgaagatgtgtgttgcttatcatccattgtatcacttccttattatgtattatgtacttttaaattctgtgtagttaatcatatcaatttatgcaagatagcgcaccatatttcactataattgattaatttttagtcacaacttagtttattttaaattaaaaccaggataacaaattgcatcaccctggttctaactattattattaaaaattatattaaaattttagccattccgtatattcttcatataaatcatcaaatacagacattggcaatgtgaaatcaccatgtgtctcaatataatcagacagtatgttaaaatcatcatcgtgttttgggaaagcaagatcgtcaaatatctcttctgctagacgacctttatcgtcgtgtcgcccacgaactgtcatgacaaattgataaaacgaatagtttttcattagttcattgtcacatcaatcacttttgtttcacctttaatcacagcattttcatcataaatattaattgaagccgcttgatctgtgttagtaataataattggtgaaataacagacttagcgttattattaatatattcaaggttgaatcttactaatggatctccgacgttaacttcgtcaccactagacactaacacttcaaatccttcaccatctagttgaactgtgtctaaaccgatatgaactaataactctaatccgttatctgcttttaaaccaatcgcatgctttgttggaaagacattgtcaacacgccctgcaattggagacacaacttctccttctgttggattaataccaaaaccttcgcccatcattttttgtgcgaatacaggatctggaatatcttcaattttcacgtattctccagttaatggtgcataaattgcgatatctttctgaacttctttgccttttccgaataattttttaaacatactttccactcctacttatcaaaatgtgatattaaatcgccataacccaattcttctaatttttcatatggaataaattgaattgcagcggaattgatacagtatcttaagccgccactttctttaggtccatcattaaagacgtgtcctaaatgactatttgattcttctgaacgcacttcagttcttaccataccaaatgatttgtcgactaattctataatttcatcgtcatcaagcgctttggaaaagctaggccatccgcactcagaatgaaacttttcttcagatgtaaataaaggtttaccagaaatcttatctacataaatccctttagcaaaatgattccaatattcattcataaatggtggttcagtgccattttcttgtgtaacaatatattctatatctgttagttcacttttatcttttttaagcattttgattcccccaatgtgattctataaacgcttttctacctgaaccacgttgatattggtaataatgtaccgggttctttttgtaataatcttgatggtagtcttcagctggatagaaatttttatatggtttaataggtgtaatcactggtttcttgaaaataccttgttcatttaattgttgctttttaaactcagcagcctttttctgatgctcatcatgatagaaaatgactggttgatagctttcgcctctatcgaaaaattgcccttgatcatcagttgggtcaaatgttttgaaatatatgtctaatatattttcaaaggaagtaacctctggatcaaacgtaatttgtactgcttcgacatggccggtttgattcgtacatacctgttcataagttgggttgtcaacatgaccaccactataaccagatacgactgacttgatgcctggatatgatgtaaatggtttaaccatgcaccagaaacatcctcctgctaatgttgcatattcttttgtcatatgaattacctcctctatctatctaattataaatttagtctataaaggattgaaatggaagtaattaacactgaaaagattaaatttacttcttaaggactacgaggccaatcgcaccttgaccagtatgcgcagaaataactggtgtagttacatttatatcgtaattattcacatgaaaagcttcattaaaaactttcttcaatttatcaacatattcaatgacgttagcatgtgcgacaccaacggatttgatttcatgatctcctataaattcagcaatttcctttttcaagtattggatactagaattttgagttctcgcattgtgcacaagctctaagcgaccatcgtctagtgtaccaattggtttaattttcataagattaccaattaaaccttttgttttactaattctgccacctttaattaattgattcaattgccctataactacaaataatttaatgttttctcttaaatgatttaactttttaactatttcagaagttgagacaccttcttttacaagctctactaggtgttgtatttgataccctaaaccaaaagaaatagattttgaatcaataacagttacattagcatctaccatttgacttgcttggtaagcagtgttaaatgtaccacttaatcctgaagaaagatgaatacttatgatttcagcgccatcttttcctagttcttcataagcagatataaattcacctatggctggttgacttgtctttacatcttcatcattttcaatatgattaataaattcttctgatgtaatatctacttggtcaacgtatgaagctccttcaatagttaaacttaaagggattacatgtatgttgtttgcttctaaatattctttagataaatcggatgttgagtctgtcactataatctgttttgtcatggtcattttcccccttattttttacgaattaaatgtagaaaggtatgtggaattgtatttttttcatctagtttaccttcaactgaagaggcaacttcccagtcttcaaatgtataaggtggaaagaacgtatcaccacggaatttaccttcaataacagtaatatacatgtcgtccactttatcaatcatttcttcaaataatgtttgccctccaaatatgaaaacatggcccggtagttggtaaatatcttcaatagaatgaattgcatcaacgccctctacgttgaaacttgtatctgaagtaagtacaacatttcgacgattcggtagtggtttaccaatcgattcaaatgtcttacgacccattactaaagtatgacctgttgataattttttaacatgcttcaaatcatttggtaggtgccaaggtaattgattttcaaaaccaattactcgttgcaagtcatgtgcaactagaatggataaagtcataattatcctccttcttctatcatttcattttttattactaagttatctttaatttaacacaatttttatcataaagtgtgatagaaataatgattttgcataatttatgaaaacgtttaacacaaaaaagtacttttttgcacttgaaaatactatgatgtcattttgatgtctatatggttagctaactatgcaacgactacactgctattggagcttttattgctggatgtgattcatagtcaacaatttccaaatcttcataatttatgtcgaaaattgacttgtcactattaatttttaatgttggaggattgaaactttcacgtgctaattgtgtttgaatcgcatcaatatgatttgaataaatatgtgcatctccaaatgtatgcacaaattctcctacttcaagtccacattctttggcaataaggtgtgtcaataaagcgtagcttgcgatattaaatggcacacctaaaaagatatctgcgctacgttggtataactggcaacttaacttaccatcttggacataaaactggaacattgtatgacaaggcggaagtgccattgtgtcaatttctgttggattccatgcagatacgatgtgtcgtcttgaatctggattatgcttaatttgctcaattactgtttttagttgatcaaaatgattaccatctttatcaacccaatctcgccattgttttccataaacattacctaaatcaccgaattgcttcgcaaatgtatcatcttcaagaatacgttgcttaaattgtttcatttgttctttatattgttcgttaaattcaggatcactcaatgcacgatgcccgaaatctgtcatatctggacctttatactcgtctgatttgatataattttcaaaagcccattcgttccaaatattattattatactttaataagtattggatatttgtatctcctttaatgaaccataataattcggtcgctactaatttaaaagaaactttctttgtcgttaatagtggaaatcctttagataagtcaaagcgaagttgatgaccaaatttcgaaatcgtacctgtatttgtgcgatcatttcgtgtatttcctatttctaaaacttcttcacaaagactgtgatatgctgcatcaaatgaattcaacatatgcgataacacctcattttcattatttatagtatgtatatttagttcgatataattaaactttatgtagcattttgttatcactcattttagtaatatgatattaaaatcatgaattccgttactttatttataaaatgctgattaagtacctgccacatcataacgtgatctatgtttccaattgctaattgtttacccaaatctataactttaatgctaaaaaattttaaaaaagaggttaacacatgatttgaatattatgtttgatgtcctattaaaacagttaaatttctagaaaatatagttggtaagaacgtactttatataacaaatggaatacaactatattctctattttcaatgacagacaccatttttaatattataaaatgtgttaacctttatatttatttatgtgtactatttacaattttcgtcaaaggcatcctttaagtccattgcaatgtcattaatatctctaccttcgataaattctctaggcataaaataaactaaatctcgacctttgaataaagcatacgaaggactagatggtgcttgctgaatgaattctcgcattgtagcagttgcttctttatcttgcccagcaaaaactgtaactgtatttgtaggcctatgttcattttgtgttgcaactgctactgcagctggtcttgctaatccagctgcacagccgcatgtagagttaataactacaaaagtagtgtcatcagcatttacttggttcatatactctaatactgcttcgctcgtttctaaacttgtaaaaccattttgagttaattcgccacgcatttgttgcgcaatttctttcatataagcatcatatgcattcatatttaattcctccaattaaattgttctgttcgccatttgtttccatactgaaccaagtgcttcatctccgttttcaatacgagatatggccatttcaatttgtaatttaacttcaaacgcattgtcattaatatgggctttaagtgcgggaagctgctctgcattaccttcatcaaagataaacatagcagcacgccacctaacgattttttgtggatcatctaatagtagcaccatttctggtagtgcctctggataccctaaatcgcttatgcaatcccctgcagttcttcttacagcaggacttttatcacgaagccccttatataaatacggtaaaatttctttactttcaatcattcctaataatacaatcgcttgacgtctaaccggtactttttcatcagataaagctaaatcaagcaacggtatatcttcaaaagtcggctttggaaaatggtttaacattcgtaatcgagtcttccaattatcagtcgcatgatattcatccaaagagacatggcgatagaaatgataattattagttgcgtgattttcttctaaagcatgttttaccaatacaggtaactgtgattctggataggtagctagcacttcttctaggacaccatccattacttcttcaatatttccatagcgatttcctaaatctagccatttacgcataaaaacaatattgtcatgttctgtttgcgcttgagtcatatgatcaacatatgtttgtggtaattgttctcttaattcttggtcagcagaagttagcttaatttgatacggtatacccttaaaagttaatagttcagctttaatttcaccaaaatgattgtcaatttgtgggtcttttccagattccaacacctgactttcaccagaaaaagcagctttaatatcaggtaatatgacttcccaatcagcttttggtgccttatcaacagctaagaagttcatgacatgaaaaatggaagtgataccatctatagataacaactgatttataaatcttggttgattttcttctacttttttataagtattagataacttgtcttctcttgtatatgacaaaacaactttcattgtatttggacttggcgttggctctatacgtaaaatttccatatactttatccccccgaatactagttgatgaaaaatttattcgaatacagcctctacttttggcaatactgtttcccaatttgcgtcattttctttatctactgaaataaagtccataacatggaaaattgatttaacaccttcaacctttaagatgtcattaataaaagctggctgtgaatcatcaactttagtatacgtatctgatgtcataccttctctgctttcactaagtgtaatcttcattgtgttgtggttcggtgtttctgatatagatataatttgcatttgacttcctcctattgaagttcatttcctaattgttttatttctttccctattgaacactcattgatacaaaaatgatgcgccttcgttttcccctctaatttacgcagacgagttttgattggacattgattgcaataagtattcattaaatcatctattttcgcgagtgcattttgctctgaaaaagttaaaatacgcgacacttcctttattacttcaaaatattgcaaccttggaaataagtgttactgttttaaatttgacataaaaatataataacatttttgaccctaagatttgaatgaaaccttttacaattctatacgtaaaatgtatttatattcaaatgctattgcatcgcaaacgatttttcagtaaaatgagtaagttatttattgagcggtttctaaacacccgcatgatcaaaatttaggaggacattttaatatgtataatgaaattttaggactagttacatttattgcaacgttcctgcttatggtacttatgtatcgcttttttggtaaacaaggtttaattgcatgggttgcaattggcacgatcattgccaacatacaagtgattaaaactgtagaaatctttggtatttcagcaactttaggtaatgtcatgtttgcttctatttatttagcaacagatatattaaacgatatttatgggcgtagagttgcaaaaagagcagtttggttaggcttttcatcaacattaattatgattattgttatgcaattgtcattacattttattcctgcaccagaagatatggcacaaaaagcattacacgcaatctttgatgttgtgccacgcattgctttaggctcaatcgtcgcatatattattggtcaacatattgatgtatttatcttttcactaattaaaaaagtatttagttctgataaaacgtttttcatccgtgcatatggtagtacatttttaagctcaataattgatacagctttatttgtagctatcgcatttatcggaagtttacctggtacagttgtatttgaaatatttattacaacatacgtactaaaattagcttcgacagttttcaatgtaccatttggatatattgctaaatcattttatcgtaaaggtaagattgataaattggatcaaggctattaaagcacttactacataatagaataagttttaaagctgatatttgagaaaattttatcatgatgattttttgggaagtatattacagtactacgtattagaaaatcatctttgaatcagtgaatattttaaacacgtgttacttatttaagtgatgcgtgttttttaatggattacccaacatattttgtattacagtaatagtaactttaactaagtattgaatagaaagtaggcttattatggcgaaaataaattttgatgctgcgacgaaaggaaatccaggtataagtacatgtgccattgtaatcaaagaagatgagcagcattatatatatacacatgagttaggcgaaatggataaccacactgcagaatgggctgcttgtatctatgcattgaagcacgcccgtgaattaaacgttagcaatgcgttgttgtacacggactctaagttaattgcagatagtgttaacgctggttatgtaaaaaatgcaaaatttaaaccttattttgatcaattggaaatatttgaacaagattttgatttattatttgttaaatggattccgagagaacaaaacaaagaagcgaatcaacacgcacagcaagcattgtacaaattaattaaaaagaacaaataaaaggagcaccgactgacataatttcaatcggtgctcctctttttatcgaagaaacaaattattttttattttttttagatttctttttcttctttttagctgctacctttttagaaggtttttttgatgcggactttttccctttggattggttatctttttgatttttctttttagccaataataaaggtgcatcatcttcattagattcaatactagttgttgtttcaacatctacctctttatctttgcgtcgttttgcgattaagagtggtgaatgttcgttatcttgcaacactttttcatctgtgtgttcatttgtaacttccacattttcttcatcttcttttctgcgacgtttcgcaaataaaagtggtaaatgtttagtaccttctattgaacctttcttcttgtctttgctattatctctaatttccaattcttcctcttcatcctctttacgacgacgtttcgcaatgaagaaccagaagctagcaagtaatccagaaataccaacaacgccaagtgcgtttttgataacattaccaattcggtcaccgaaatgacgcatatgaagtggatcgatttcatcatcttgatccaatttctttttatgtccactagtcgtactgttatatggatgatttacagtgccataaccgatgcttatatgactattagattgaccatctgaatttgatgaatgtttgctatgatcagatgttacaatttgtactgctaaaattcgtgcgataccattattcaatgcagcctcaacttgttgtggcgtatgcgcattattaatatctctgattgtttcaagcacaatttcgttaattcgattcattgctgcttgtctttcttcagcagttcctattgtactatttctaatgcgatcaattttatctgtagaaatatctttaatttttgaaatcgctacttttttacgtttttccaattctttagcaaatggatttgccactttcagttgcgctttaaattgatctaattgttgcgtaatttcatcgatgctttgcgcacgttgaatcgcctgaattgattgttcttttaattgatttaatttagatatagcttcctgcttctctttatcagttaaatccttgcttgcattaatttcatcaatcatatgttggatagcatcagtaattgatttaatagcatttgatttggcttggtcaattgtaaattgatctggattaaattgttcaatatgcgcttgttcttggtgttgaacttcttcaaccgtatgaacatctgctgcattgttaatttgctcaatagcttgttgttttagcttattaacttctgcaatcgcagcttctttttgttcaggtgttaatgttgcgtgattattgatatcattaatcttttgttgtgccgcattttcaattgattcaatcgcctgttgtttgactactgtcaattctttttctactactttcacaggaacattaacaatcacttttgatccatcaagtaatgttacttcaacctttgctgttaagctatcagaaattgattcagttgacggtgtatcaataacttctgctgtaagctgatcaattaagttgatatgtgctagaatatcttgttctgtaatgatgtcatcacgatgcacaatgagttcaccattaactaggatttgctcaggtgttgcgtcaaaaatttcatttacagcaggttgtgcatcaacttcccatacatgtgtatttctaatatcatctaatcctaaatttaatccttgatttaattgatctttagtttgagcattttcaatgttttctagtgctcgtttttcagcttcgtcaatttctttgagtgcttttgctttttgctcaggtgttaaatcagggtttgaattgatttgatcacgcttcgcatttgctaatgctttaatagcatttttcgcatcttctttagctttcactaaatctttaatgtcttgtaatgcttgtgcaagttgcgctttggcttgttcaatttcttctttagtcatcgcattgttaatgccgttatgaccttgttgcaagatttgatttattcgatctttaagtgcttgtttttccttatctgttagatttggatttcgatcaatttcgtcaattaatgcttgaacttgtttatcaacatcttgtttcgcattttctttagctttcactatatctttaatttcttgtaatgcttgtgcaagttgtgctttggcttgttcaatttcttctttagtcatcgcattgttaatgccgttatgaccttgttgcaaaatttgattaattcgatctttaagtgcttgtttttccttatctgttagatttggatttcgatcaatttcgtcaattaatgcttgaacttgtttatcaacatctttatttgcatcaattttagctttcggtatttcattggcatgcacttgttcaatcgcatggttaccagctgtttgaacttgagatacatcctgattgcttgttgctttattaatgttgttaatgatgctgtttgccaatgcttctgctttatttttcgcaataagcttgtcttgatccgtcgcatttgaagcttcgatttctttcaatttatctgctaagactttgttaacattttgaattgctttgtccttagcttcttgtagacgttgctcaccgttaagattttggattgcatctttgactgtttgaattgcgccgttgatatcattcacatttgtgtgatcactattaattaatgtatttgccagacgttttgcatcatcaaagtttgatttagcaacatcgtcagcattttggtaattgacagtttgttctgcagttggaatttcattgtcaactaaatgtttcaatgtttccatcgcgttattcaagtcgatttgatcattaataatattcgctatacctgttacagtatcggcattattaattgcttgatgtgcaagatcttgttgttgttgatttaaaccatttaatgtatcaacaaatgcattagctttatctttagccgttgcaagattttgatcaccatttaaggctttttgagcatcgataatatgttgttttaattgttctgcctcagctttcgcgattgcactaccttgaactttatctaactcgtgtgttgcatttgtaatggcattgtcataatttgctttcaagttatcgtctgcattgatgtaatttgtactgctaatgacatcaagatgatgttcatcaatatactgttgtactgcacccattgcatcatctaattgaacagctctattaattgctcgagatgctttatttagcgtttcagcattattaatttgttgaattgctaattgtctttgagcattgtttagatgtgttaattgatccaatctttgtaatgcttcagacttacgattattaagtctttcttcaccatttaatgcctgtttcgctgccgttaccgcatcgttcaatttgataacttcttcagcagttaagttttgacctgtcgctttatttagtgcttccttcgctttatcaactgcttcatcgtacacgcgtttgacttgtgtatctgcattgacatagttcgtactacctttcgtacgtccttcattgccagtgatttcttgagacaattgattcattgcacgatttagcgccttagcctcatctacaatttgttggatttgatttaaatcgtctgattgatcgatgcgacctttaaatccatcttgttgagcattgtttaatgcatttaattggtcaatgtcatgtttaccatttgttttagcaagtgctacacgttcatcaccagttaatgcttgttttgcatttaaaatgttttgaagtgcttgatctacttgttgtttattcgcattttgttttaatacattttcagcatcagcaatcgcttgtttataagccttttgcttatctgaatctgcttgcgtgtaatcaactgtttgttcaacgtttgtatgatcattgaccgcttgttgtaattgatccattgattggttcaattgtgttgcttgatctactaactcagcgattggttgaagtttcgtcgcttgatcaatgttttgtttcgcactagcaatttgatcagcatttaaatgtgttaattggtcaatagtttgtttcgcttgtgttttagcttctgcgactctctcattaccatttagctcattttctttttcttgaagcttcgttaacgcttgttctacagcatctttatttgcatttgaaccattattaggatctgtaatgctttgtgcagcttgtaacgcttgatccactgcttctttttatcggttgatgcttcagtgtaatttggttgtactttatctacattcacttgatcaactttatttttcaatgtttccatcgcgtggtcaagttcagtagccgtttgaacatgttgtgcaacctcagttcttgtaggcgctgcatttatagcatcagttaatgcttgttgttgcgcatgatttaagtttggtaatgcgttaacagtcgttactgcttgttgttgatcacgagcaagtttttgatcaccatgtaggttatcttttgcagttgttactgcttgtgttaattgttccacttgtgatttgtcgagtgttggattacctgtttggttaattaaatctttggcatgttgtactgctgcttggtatgcatccttttgtggcttatcttcattgataaacttgctaccagattctgtttgttgttgatcttgaatactattacgtaatgcttgcattgcttgatcaagtgcttttgcttcagctaatttttgtgctacttcatcacgagttgctgcgttgtttatttgactttcaagtgcttgacgttgcggattgttcaaaccatttaattgatttaaatcagtaaccgcatgttgtttatcgtctgcaagtttttgatcaccatgtaagttatctttagcttggttaacagcttgtgtcaattgttcaacttgtgctttatcaagcgttggattgctagtttgattaatcaaatctttggcatgttgtactgctgcttggtatgcatctttttgtggcttatcttcattgataaacttgctacccgcttctgtttgctgttgatcttgaatgctattacgtaatgcttccattgcttggttaagtgcttgtgcctcagttaatttttgtgctacttcgccacgagttgctgcattattgatttgattttctagtgcttgacgttgtggtgtattcaagttagacaagttatttaacgtttctgttgcacgttgcttatcttgagctaattttcgatcaccatgtaaattgtttttagcatcagtcactgcctgtgtcgcttgatcaatgattgatttagctaatgtaggatcagttgttttgttaatcaaatctttcgcgtgttgtacagcttgcgtataagcatctttttgtgcttgatcttcattaataaatttactacttgcttcagtttgtggttgatctttaatactttcttttaatgctttcatcgcttcatttaatgcttgcgcttgtgcaatgatttcagccactttatcacgagttgttgcattattaatttgattttctagtgcttgttgttgtgctggtgttaattgatctaaatgattcagagaatttccagctgtttgcttatcttgcgctaatcgttcaacaccgtctaatgcatttttagatgatgttactgcttgtgtcgcacttgttacattacctttattgatagttggattatttaatcctgcaatgatagactcagcattttgaactgcttcatcaaatgcttgttttttattcggttcagcattgacataggcactgctcgcacgtgttgcatctttgtcagcaatactttgttgtaatgcatccataagttgatctaacgcttgtgcttcagccaaatcatggttaacggctgttctagttgtttcactgtcaattaacgtatcttccatatgtttttgtgcattatttaaatgtgctaattgactaaccgtttgtttcgcacgatctttatcattttgtaatttcacatcaccatgtaatgctgctttcgttgtattcacagttgtcgctgcttgattaattgcattattatctaatgttgctgtttgttcattgataatattatttgcggcttgcactgcttgatcgtagttttgttgttctggttgatcttcgttgatatatttgctatttgctttagttgctgcgttatcttgaatactttctcttaagccatgcattgcttggttaagcgtattcgcattttgttcaatttgatgaactgcagttactaaagttgcagcagtaacttggtcttttaatgctgttttttgaggatcatttaagcttgttaaagcatcaattgcttgcgtcgcatttgttttagcaacttgtaaattatgatctccatttaaggcttgaagtgttgtttgaactttagtaatagcttgttctacttctgtttggttcgcattttgaccggtttgtttgttaatcattgcttctgcttcatttaccgctgtagtataagcagtttgtttatcagtatcagcattgacgaagttaccacgttgttcaacgacttgatgatctgcaatcgcattaattaagttacccattgctgtatttaaagattctgctgtttgtttgtgaccattaactgcagcaatatcagatgatcgcgcaatttgtgattgtaactgttgcttttgcgcattatttaaatgatctaattgatcaagtctattgttcgcttgttgtttagctgctacaagattttcatcaccatctaatgcaactttcgtgttatttacttgagttgttgcacgattaacatcatctggattcatcgtaggtgatgttgtttgattaatgatattattagcagctgttacagcttgattatagtcattttgtctttgcgcagttgcatcatgataatcttcagatgctaatgtcgcttgattatctgcaatactatttcttaataattccatcgcatgatctaacgcttgcgctttttgattaattgtagtgacatctgtaacaagtgacgcttgtgtaatttgactttcaactgattgtttttgtgcatcatttaagtgtgttagattcaccagttgttgtttcgcttgttgcttagcattcgctaaattatcattaccatttaatgcttgtttcgctgcgttcacttcattagtgatgctttcaacttgtgcttgtacttcattagtaccactttgtttattcaataatgcttcagcttttgctacggcctgtttatacgcattttgtttgtcaggatctgcatttaaataattaccatccgttaatgtttgagtcttatcattaatagcttgtgataattgattcattgcttgatctaggctcgttgctgtttgtttaacttgagttactgttgcaatttcagccgattgatcgatttgaccttttaatgcttgtttttgagcatcgtttaaatgtgtcattgcgttgacagcatctttagcattttgcttttcagttgccaatttagcttcaccgtttaagccatttttagcatcagtcacttgagttaatgcacgagtaatatcatctgggttaagcgttggatttgtcgtttgattgataataccttccgcttgagacactgcatttgtatatgctgtttgcttatcggcatcagcatcatgatagttttcacttgctttgacggtatctttatttgcaataccttgtttcaagttacccattgctgtattcacattttgtgcattttgtttagtttgttcaactgtagctaacgcttgtgcttggttgatttgattacgtaacgcatcacgttgtggttgatttaagtcacgtaacgtatcaagatttgctattgcatcttgtttcgcatgcgctaatttttcatcaccgtttaatgcatctttcgcttgattcatagttgtaactgcttgtgttactgtatcaggcgtcaatacaggtgttggtgtgccatttgcgatttgttgcgcttggttagttgcattgttatatgcttgttgtttgtcttgatccgcttgtgtaaagtcaactgattgtggtacttgactattcgcttgaatttgttgtttcaacgtacccattgcattatttaatgcatcagcattttgcttaatagcattaacacctgtaacaagttctgcatgtgacacttggtcttttaatgctgttttttgtggttgatttaagtttggtaactgatcaatggcagtattcgcattgtctttagcaacttgtaagttatggttaccgtttaaatcacccttagcttgagtcacttgttgtaacgcttgagccacttgttgtggatccacgtttgcatttggtgtaccactaataatttgttcagcatgtgcaaccgcattgttgtaagcattttgcttatcagtatcagcattgacaaagttaccatttgctttagtttgatctttatctgcaataccttgtttcaattgtgtcattgcttgatttaaatcttgtgctgtttgcttaattgtgtttacatttgcaacagtttgcgcagcatcgacttgttgttttaatgcatctttttgcgcttgatttaaatcattcgcattagtaataacttgtttcgctgcatcttttgcacgttgtacattgtcactaccattcaatgcttgtttcgcttcgttcacacgttgcatcgcttgttccacttcagtttgacttgcattgctgccatttgctttagataaaatgtcttctgcatgtgcaaccgcattagtataagcatctttcttagctttatctgcatcagtaaagttaatgctatttaatgtctcagttttatcttgtaatgcattacttaagttagtcattgcattattcagattttgagcattttgcttaacattattaactgttgcaatatctggtgcttgttcaacttgagttgttaacgcttgtttttgcgcatcatttaaatgatctaatgtaccaagatttgtcttagcagcttgtttggcatcagctaatttttgattaccgttaagtgcttgatttgtatcattcactttagttaatgcttgttgaattgtatttggatccattgttggatttgttgtttgtttcaacaattcttctgctttagttactgcattatcatatgctgtttgcttgtcagtatcagcatcgtgatagttctcgctacctttaatttgtgctttattcgcaataccttgtttcaattgtgtcatcgcatcattaagcgtagttgccgcttgttgaatagcattgacgtttggtacaagtgttgcttgcgtgatttgtttgttgtattcatcacgttgcgcttgattcaagtttggcaattgatcaatagcatgttgaacattttgtttcgcctttgctaagttcgtattaccatttaaatcatttttagcttgcgtaactttatttaacgctgcagtaatttcgctaggtgtaacgacaacatcaggcgtaccactaattaatgcttcagctttcgcaactgcttgtttatatgcattttgcttatcaggatctgcattgacaaagttaccatcagctttagtttgctctttatctgcaatgccttgttttaattgtgtcatcgcattgtttaactcttgcgctgtttgtttaacattgtttacaccagctacagtagttgcattttgaacttgttgttttaatgcgtctttttgtgcttggttaaggtcattagagctattaattaatgctgttgcttcatctttcgcatgttgaacgttggcattaccatttaaagcttgttttgcagcattaacttgttgtattgcttgttcaacttcagtttgtgttgcattaccaccattagcttttgaaatgatattttcagcacttgtaacagctgtattgtatgcattttgtttatctctatctgcatcaacatatggttgactcgcttttacttcatctttattcgcaatactatttcgaagttgattcattgcattatcaagatttgtcgcgttgtctttcacactttgaacgccagttacttgtgtcgcgctatcaatttgaccagtaatactttgtttttgtgcatcagataaatgtgtcatttgacgtaatgcatctttagcttgttgcttcgcagttgctaagtttgtatcaccgtttaaacctgtttcagcattattcacacgttgtgttgctgctgtaacatctgctgcatttgtaatcacattaggtgaaccatttacgatattcttcgcagcattatatgcatcagtataagcaccttgcttatcaggacttgcgttagtgtaattaccaccagcaacaattgtgtcatgatcagcaattgcttgttttaattgatccatcgcactattaagtgatgtagcactatttttcagatcagttacacctgatacacgttgcgcagcattcacttgttgttttaatgctgttttttgtggtgtattcaaatgtgtcaagttatcgatagcttgtgtagcttcagttttagcgcgttgtaagttcgcgtcaccgttcaaagcattttcagtagacgttacactttgaattgtctgttcaacagcttgcttatctttattcgcaccatgatctttatttaagtaagattcagcttgtgtgatggcattatcaaatgctgttttcttagttggatctgcgtcgatgtaattttcgttcgctttagtttgatctttatttgctatagctgattgtaatcgttgcattgcaccatctaagtcttgtgctttcgttttaacaccatttacaccgttgactgttgttgcgtcttcaatttgtgatgttaaatcttgtttttgtgcattatttaagtgtgttaatgtacctaagtttgctttcgcatctgattttgcttgtcttacatttgcgtcaccgtttaaagcatttttagcattcgttacttgatttaatgccgcttcaacttgtgctttcgtcatattttgaccgtgtgctttatctaaaataccttgagcattcgtaacagcatttgtgtaagcatctttcttaccttggtcagcatctgtaaagttcacttgttgtttaacagtgttttggtcattaataccattttgaagttgacccattgctgtatttaattcattagcagtattttgtgccgcagttacgcctgctactgtcgttgcattgtcaatttgacttgttgctgcagttgattgcgcgttattcaagttactatatgaagctaaagcacgtttcgctgcttctttagcttttgcaactttattatcaccgttcaagttgtttttagcttgattcaattggttaagcgctgtttgaacttgcgcttcgtcggcgttgctgccattagcattggtaattccttctgcttgtgtaactgcagtgtcatacgcttgttgtttcggatgatctgcgtcagtgtaattgacactacgtttcgtagtatctttttcagcaagtgcatgtttcaaattacccatcgctgtatttaacgatgttgctttatttttagccgctgtgacagctgcaagatttggtgcttgatccacttcagcatttgcggaagtttgttgtgcgttgtttaagtctgataaacgaccgatttctgttttcgcagtttgttttgcggctgctaatttttcatcaccgttcaatgctgacttcgcactgttcacttggctcgctttttgattaatcgtatctggattcatttcaggattattcgttgcactaataataccctcagcatcagatactgcacggttgtatgcattttgtaaatctgcattcgcgtcttgataatcttcgcttgatttagtcgcatctttagatgcaatactttgtcttaattgattcattgcttcatttaaagtaccagcatttgcttgaataccttgaacaccagatactgttgtaccgctttcgatttgcgatgttaagtttgatttttgagcatcagttaaatgtgacattgtcgctaattgttgtttagctgtattcttcgcttcatttaatcgcgcgtcaccatttaatgctgatttagcagtatttacacgttgtaaagcttgttcaactgctgctttattgtcatttgcgccagctgttttatttaataaagttttagctgctgatacagcatcattgtatgcagcttgtttttctctatctgcatcagtatatttctgagctgctttagtagctgtttcatcattaataccactttgtaagttgctcattgcagtatttaattcagatgccgatgtagacacttgatttacacctgcaactgttgtcgcaccttcaatttgtgatttcaatgcatctttttgtgcgttgttgattgatgtaaggttattcaatgcatttttcgcatttgtcttagcattcgcaacattttgattaccgttcaattcatttttagcacgttgtacattttgtaacgcagtttcgacaccgtcttttgcagtatttggaccttgtgctttatttaaaatttgttcagcttgcgtcactgcatttgtatatgcattacgtttcacttcatctgcatcagtgaagttaacaccttgcttaatcgtattttgatcttgaataccatttttcaagttcgtcatagctgtatttaatgcatccgcattattttgtgcttgtgttacttcattaacatgcgttgcaccctcgatttgacgtttcgctgcttctttttgagcatcagttaagtcacttaagccattcaaatgttgcttcgcatttgtttgcgcagttcttaagttttcttgaccatttaaagcttgttgtttagctgtcacttggtctttcgcttgattgatttcttgcgcatccattgttggacttgatgtttgaccaatgattgcttttgctgcagaaactgcattgttgtagtcagtttgtttgttttgacttgcatcagtgtagttttgacctgctttaatcgttgcttcattcgcaatgctatctcgtagacctttcattgcagtgtttaatgtttgtgcattatcacgaacagtttgaacatttggcaacgtcgtcgcttgacccacttgttctttaagttttgctttttgcggaccatttaaagaagttaaaccatcaattgctgtgttagcattttgtttcgctacttctaaattatgattaccgtttaactgcgtcttcgcattcgttacttgtgttgctgcatttgtaacatctgatggtgttaacgttggcgttggtgtaccactaatgatgttttctgcagctgtcactttttcatcatatgcttgacgtttattcgcatcagcattgacatagttaccactggcttttgtctcagctttatcagcaatggcacgttttaaagctgtcatcgcattatttaattcagtcgcagtatgttcaacaccatttgctgcagatacgcgacctgcgcttgtcacttgtgcttttaatgcttctttttgtttcgtatttaagtccgaagcatttgtaatcgctgtgttagcagcctgttttgcacgttctaagttttgaataccgtttaatgcagtatttgcttgcgtaacagcttgcattgctctttcgacatctgctttaggtgtatttccgccagctgttttatttaaaatagttgctgctgcatttactgcttgagaataagcagttcgtttagcatcatcagcatcttgataattttgactttgtaacgtcgtgtctttatcacgaattgatgtttctaattgacccatagcaccatctaattgttgtgctttggctttaactgtattaacaccttcaacatttgttgcttgtgtaatttcattatctaacgctgtacgttgtgcattattaatgtgtgttaatgtacctaacgtttgtttcgcagcggctttcgcttcatttaatttcgcatcaccgttcaacgccgtcttcgtactgttcacattttgtaatgcttgttcaactgctgctttgtctacattttgaccactagcttttgttaaaattgctttcgctgcatttacagcttgatcataagctgattttttacttggctctgcatctaggtatttctgagtttgttttgtttgtgtttcatcattgataccgttttgtaaactacgcattgcgttatttaattctgttgcttttgcagtttcttgatttacaccagctactgttgttgcaccatcaatgctatgtgttaacgcatctttttgtgcattgttaattgatgttaagttattcaagttatttttcgctgttgtcttagcttgagctaagttttgcgcaccatttaatgcatgttctttagttgtcacttgtgatgttgcttgcgtaatagtatttggttccatcgttggattcgatgtttgattaatgattgcttttgcggcagtaactgcgctgtcgtactcgttacgattatttggacttgcgtcagtgtagttttgacctgctttaattgttgcttcattcgcaatactatctcttaagcctttcatcgctgtattcaacgtttgagaactatttttaacagtttgaacaccatctaatgtagttgcactttgaacttgttcttttaattttgctttttgtgcattattcaattgtgctaagccgtcaattgtattgttagcatgcgctttcgctacacgtaagttgttatcaccatttaatgctgttttagccgcatttacttgtgaagtcacactatttacgtcattgactgttaatgtcgcattcggtgtaccattaatgatattttcagcgttcgtcacttttgaatcatacgcttgacgtttttcttgatcagcattgacataattaccgcatgcttttgttctttctttatcagcaatagctgctttaagtgctgtcatcgcgccgttcaattcagttgcagtatgttgaacgttattcgcatcagatacacgttgtgcattgttaacttgtgtttttaatgcatctttttgtttttggtttaagtcatgtgcgttgttaattgtgttcgtcgcatttgttttagcttgagctaagttttgtgcaccatttaacgctgcttttgttgtattgacttgatttgccatgccattaatcgcattagcatccatatttggcgtgttcgttgcattaataacaccatttgcattatttacagcagtattgtaattatttttgttgctatcagatgcatcaagataattttgacttgttttcgtcgtattatcattttggatacttgtacgtaatgcacccatggcagtatttaacgtattacctttatctttaacaccatttacacctgctacattttgcgcttgttcaacttgatgcttcaagttgtctttttgtaattgtgttaagtttggtaacccattaatcgtatttgttgctgaagttttcgtatttcttaagttttcagcaccatttaaagccgctttcgctcttgtaactgcatttaatgcattatcaacgtctgctttagatgtgttaccaccagtttgtttatttaaaatgccttcagctgctgtgacagcttgagtatatgcatttcgttttgattcatccgcatcaagataattttgatttcttaatgtagcatctttatcattgattgaaccttgcaagctattcattgcgccgtctaatgtattggcatttgttttcacagtattaacgccatcaacagtcgtcgcttgattgatttgaccttctaacgcagtacgttgtgcatttgtaatatggtttaaagtacctaagttttgtttagctgccgctttcgcttctgacagtttagcatcaccattcaatgcatctttcgtacttgttacttgttgtaatgcacggtcaactgctgctttatctgaatttgaaccagtttgtttatttaaaattgctttcgctgcagctacagcttgatcataagcagttttcttactttgttcagcgtcacgatatttttgagtttgttttgttgtattttcatcatcaataccatgttgtaattgacccatagctgtattaagttcatttgcagtttgttggatacttgttacatttgcaacacgttgcgcacttgtcacttgtgcttttaacgcatctttttgcgctttatttaagttcgttgcaccatcaatggcatttgttgctgtttgtttcgcttgcgttaaattatgtgtaccatctaatgcatttttcgttgatgtcacttgtgtagcgatttggttaattgcatgagcatccatatttggattgcttgttgcatttatgacaccattagcactatcaacagcattgttatagtttgttttgttactttctgtagcatcaagatagttttggccatttttcgtagctgcgttatcttgaatgctatttcttaacgtacccatagctccatttaatgtgttggcacttgatttaacagtatctacacctgcaacattttgtgcttgttgcacttgttgtttcaatttatctttttgtgcagttgttaaatgttgaagtccgtttatagtagtgtttgcatttgatttagcttgctctaaattatggttaccatttagagcacctttcgcatttgttacttgtgacaacgcgctttcaacggcagctttgtctaaatttgatccgttatttttatttaaaatattttcagcattcgtaacggcttgagtataagcagttttcttatctgaatcagcgtcatgatagttttcacttgctagtgtatttgttttatcattaataccattttgcaagttagccatcgctgtattcaattgcgtacctgtattagaaaccgcttcaacaccagatacagttgttgcttgatcaattttagttgttaagtcacctttttgtgcattattaattgacgttaagttatttaatgcatttttagctgcattcttcgcatttgtaacgttttgatcaccattcaatgcatttttagcacttgaaacattttgaatagccgcttcaacatcttgtttagacgtatttgcaccttgcgttttattcagaattgtttctgctctgcttaccgcatttgtatacgcatcacgtttggctttatctgcatcagtgaagttaacaccttgtttaactgtgttttgatcatggatagcttgttccaagttgcccatttgcgtatttaactcagttgctgcatttttagcagctgttacctcactcacatgacctgcgcgatcaatttgtgttgagattgcagatttttggttatttgttaagtgtgataatgtatttaagttttgcttagcaatgttttgagcatttcttaagttttcagcaccgtttaaaccatttttagcattattcacttgtgttgtagcttgggtaatcgcactagtatccatagtcggattgttagtttgattaatgatacctttcgcatttgacaccgcgctattgtatgttgattggttattcggacttgcgtctgtatagttttgacttgctttgactgttgtttcattagcaatactatctcttaagcctttcattgcattgttcaatgcttgtccatttgtttgaacagtttgtacatcttctaatctattggcttgtcccacttgttcttttaatttagctttttgaggtgtatttaattgtgttaatccatcaatagcagtattggcgttttgttttgcttcacgtaatctttcgtcaccatttaattcttgtttcgcgctgtttacttgattagctgcagctgttacttctgaaggtgtcgtaacaaccgttggcgtaccgctaataatatgttcagcattggtaactttagttgtgtaagcattttgtttattgctatcggcgttaacatatttactgcttgctaacgtagtcgtcttatctgcgatggcatgttttaattgacccattgccgtgttcagttcagtcgtattacgttgtacatcttgtgcattagatacgcgttgagcaccattagcttgtgcttttaatgtatctttttgatgttgatttaaatcagatgcgccattgattgctgtaatcgctgcttgtttcgcattatttaagttttgcgtaccgtttaatgcatgtttcgcactattaacattattaagtgcttgctcaaccgctgttttcgctgtattcggtccagtttgtttatttaaaatggtttcggcagctgatacagcttgattgtaagcattacgtttttgctcatcagcatccaagaagttttgactcgctaatgttcctgacttatcgttgatagccgtttgtaagttacccattgcgccatctaaactatttgcactttgtttaacagattcaacacctgctaagtttgtagcttgtgaaatttgatttgttaaatcattacgttgtgctgtagtgatatgcgttaaagtacctaaatgttgtttcgctgcgttttgagctgcaattaattttgcatcaccattcaatgcatctttcgcattattaacacgttgtaatgctgcttcaactgcattttgcgcagtgtttggaccatgttgtttatttaaaatcgctttcgctgcagtaatagcattatcatactcttgttgtttatttgtatcagcatcacgatatttctcagatgatttcacttgagattcgttgttaataccattttgtaagttagccatagcttgatctagatgttgtgcattttgttttacagtatcaacaccactcactcttgtcgcactagtaatttgactaatcaaattgttcttttgtgcatctgtaatactcgttaatgtgtttaagtacgttttcgcattttgttttgccgtagctaagttttcatcaccgttaagtgccgttttagaactattcacttgctctgctttttgtgtaatcgtacttggattcatttccggattactattcgcattaattatcgtttcagcagcagctactgcattgttatatgctgtttgcttatcatgattagcgtctacgtaatcttcactagctttagtcgcatctttgttggcaatactttgtctcaacgtattcatcgcttgatctaatgtattcgcatttgattgaaccgtatgaacaccagcgacagtcgtaccactgttaatttgatttgttaaattcgttttttgtgcaggtgttaaatgcgtcatattatttaactgttgtttcgctgcttgtttcgcttgatctaataaacgcgtaccatctaagttatttttagcagaattcacttgattcatcgcttctgtaacttgatctttcgttttattttgaccatttgatttgtttaaaatatctttcgcagcttgtaccgcatttgtgtatgctgttttcttacttggtgtcgcatcttgataattttgactattaagcgtcgtttgttcatcgttgatcgcaccttgcaagttacccatcgcagtatttaaatctgtaccttgttgtttaacagtatttacgccagcaatatttgatgcagcattaattttagatttaacatctgctttttgtgcattatttaaatgtggtaatgcatcaattgctcttgcagcatctgttttagattgtgctaatttttcatcaccatttaatgcatttttattagtagtaacagctgaagttgcactgttaacatcattaacagacatcgttggattagctgtttgattaatgattgtttcagcacttgaaactgcactgttatatgcattttgtttagctgaatctgcatctgcgtaatcttctgtacgtttcacttgctctttatctgcaacagcttgtcttaagttacccattgcactatttaagtttgttgcattttgcttaatcgtattaactgtctcgatttgatgcgcaccattaatttgcgattgtaagttttgacgttgtgcattattcaagttatttaattgacctaatgcagtattcgcttcttgtttcgcagtatttaacttagcttcaccattcaatgcatgttctttacttgtgacatttgataaggcattgttaacatcacttggtgttataactggatgttgtgcattaccgttaataatgtcattcgcatggttgtatgcattgttgtaatcatttttcttattagtatctgcgttgacataattatcactttgtacgacttggttatgattagcaacaccacgttttaaacctgtcatagcagtatttaagctttgagtcgtttgtttaatatcatttactgcttgtacattttgtgcactattcacttgttgtgttaatgcattcttttgtgcttggtttaaatcacttgcatgcgtaatcgcatttgttgcttctgttttcgcacgttgtaagttttgttgaccatctaaagcaccttttgttgatttcaccgattctgctttttggttcactgtattaacatccattgttggattattcgtttctccaatgacacctttagctgcattgactgcattgtcatacgcttgtttattagctggtgttgcgtcagtgtaattttgtcctgacttgattgtattattatccgcaacactttcttttaatttcgtcatcgcattatttaaagctgtaatgttagacttgattgtttcaagtgcagcatgattttgagcagcattaatttgttgcgtgaaattattttgttgtgcttggtttaagttagatgcaccatgtaatgttgttaacgctggctgtctatctaatgttaaaccttgacgtgctgtatttaattgatccttagcttggtttgcctctgccactttatcattgatattttggaccgttggattgccatttaacacttgattaatttcagctaacttttgacgcgctgcttgtaatttttggttatacgcatttaacgaagcggtcgtcatacctgttgtatccgttggttgattaatgctttgttctaattgcgttttcgcagtttgaagcggcgctttatctggtgttaacgcttgacgcgcatgatccaaatcagatttagcttggtttgctacagacgtatttgtattaatttgatctactgtaggtgaacctgctaatacttgattgatttgttgaatcttattacgtgcagccgttaacttcgcattataagcatttacagagtcttgcgtcataccagttgtacttgtttgcgtatcaatactatgttgtagttgatttttcgcattttctaaaggcgctttatcgactgttaagccattacgtgcttgatcaagtgctgatttagtagcattcgctgctgtcacgttttgacgaatcgttgcaacatctggatgtgatgctagtacgcgatcaatttcttgaattttagttctagctgctgaaagtttgtcattaaatgaagcaacagatgcgcttgtcataccagtcgtactcgttggctgatcaatatcattttgcaactgagcttttgcagtttgtaatggtgccaagtctggagttaatccagcaattgcttgttttaagctattatatttttcttctactttagctttttctgcggcaatttgttgatctgttgcgtcaccattgttaataacattttgtgcatttgttgattctgtttgacccgcacgtttagcactttcgtatgcttggattgaagattgtgtcataccatcagttgttactgatttattgatttcttcatcaagtttcgtcttagctgttcttaaagcactattatcggctaaaggtactaattgattaatagcttgcgttaaacgctcgtttacacgatttacatttgttaatgcagattgtacctcttgtacggttctaattggcttttgaataatagcattagcgctatttttagcacttgttaagtcactttgaagtgcatgaatcgaattattgtaggcagcaatacttgctggtttcttaccagtggttgtacctgtacgattcaattgttgcactgcttgctctaattcatgtgtatctgctgttaaattttgtttcgcttggtttaatgctgttaatgcgttatcgacacgatgtttttcatctgaaatttgttgtgctgttgcgtcaccattatcaatgacacgttgagctgctgtaatttcagattctgcttcacgtttcttcgcattatagttatcaatactttgttgcgtcataccagtagttgatggtacttggttcacagaactttgtaagttatttttagatgttactaattggctattatcttctttattttgaagtaatgctttagcttcatttatcttagtttgtgcagcttgaactttagataatgctgcgttcacttgttgtggtgttgcacgatcattattaatcacttgttgcgcttctgttttcgcagtattgatttgttgttgtgcattatgaattgcattattgtactgcgtaattgtacctggctttttaccatctgtactcactggatcatctaaatgatttttagctgtgattaactcacgtttatccgcttttgtgaaaatggactcttgtacttcttcagtactgccatcattgtaagtgactgtaacaggaatcgtcgttgtgctaccaccagctaaattagtaggcattgctgtgccatttttaatcgttgcattgcgtttttctgctacatgaactgcattgttaatttcagctgctgttacatttgaaccataatctttcacaatttcagttgtgttgacagtatgtgctgccggtgcagttaatgtacttggattactgcttgctgagagacctgtacctgctttcggcgtaatgttgattgatgaatttggttttatagtatttgcattgaacgtcactttacctgtatgtgcatctaacgttacataatctggtttattggcgattgtccattgattattttgaccacgaacaacattaagtgtcttactatgttccgcaccattaccaaccttttcagtgtaggcaatatccattacttgtgttggattaattaaatgacctgatgggttattaggcgtgatatcaatgtgaccattttgccaaattttcgtagtcgcttggttcggttgtggtgcgacaactgtgaaatcatcactacgttgctcgtcactgattgtttcgccactaccttgtgttgcaacaacttgaattgtatcagcaggattgaaagtacctgctgccacagtaataccattattagttccaacaatacctgttacattagctgctgatgcttctttcacccatgggctcgtattattacgacgtgtaaatgtcgttacaacatttccattacgtttaataactaatttgtcagcgtaagttgttacgttaccggcatgtgtattgactgtttggttcgcaccaggtgcaatcgtaatcgctcctgccgctgtttcagtcacagttggtttcgctggttggacatcttttactacaaacttcgctggtagagatgttgcaaatgtatgcccgttatagatgatgtcatattttgcattaacgactttagccacattcggtttattcatagctgcccagtttgcgtcatttgtacctgttgctgcattattccatttatacgtaaatccatctgtcggtaaacctgtagcattttgcatttgtgcataaccagaggcttgtgtaccacttgctaaagtgccaccaactgttgtcgtataactattttgagggaattcaaattgatatacgttcacagttacaggaacttgtttagcagctgaaatgcctggatatgttacatcgacatttaagttttgaacgcctgcttgttggttatttggttgttgtctatttgcccatgctgcagtgataccatttgtgtttgtatttggatcaaatgtaatgtagtttatcgcatccgttccattagtcaaattttgacctttcacatcacgtgatggcgccttagcattagcaactggataaactttgacaggtacttctacattacgtgtaccttgaccatttggtaatgttacaaccacagttttatgagtgttaccaacagtatgcttccatgtatctggactatcatgccatgcaaccgttgccccatgtggaggattttgaataaatcgttctacatgaccgaaatcaaaatcgtcgccacctttaataaatacagcgccttcagtagtcgcttgtaattgaggtgtcacaagcacagaagcactatcattagagtctacagattcatttcttgttactgtaacaacttgaccatgttcatcctgcgttatatatgtcacattgttcattgatatcgaagatcttgctttaatttcaccatttggtaacgcgtcacttactgtcacaaccgaactaaaaccactaccatgcgtaatatttgtgacatttaatggtgtattatctgctttaaataattttactgacgagttatttaatacgttattaactttaatttcttggtttgtaagacccgctttgtatgtcacagagtttccgtcaattctaggtggatcaggcttaactttagatataatatttaaatcttctgtttgtctattatcatatgtcactctaataagacgcgtagatatgcctacaacatctttgttaggaccataagttccaacaaattggaaattcatatgttgcgcatttgtcgaccaagaattatttactggcttaacatattgtttcgcatcatacatatctgaaacacctgggtataagacacctctggttgtttcaaagacttgctttggtacagttcttaccactttatatgttgctgttttcgtaattggggttgtttcaccatcaattaagatatgtgcagttacattgatatcttgacctatagttgtgttatttttgtttggcgcttgaccacttacccatgtaatcgtcgcatctggaatggcactaccattcgataatttaaagtaatctgatgcacttgctccattacctgttgggaagtcttgcccttgtacagtgtaatgcgaatgtgcaacgatttctggaataacatgctttacaggtactgtcactgttgatgttgttccatcttgataagtaacagttacagtgacattggcattatttccattacgactgacattactcactgttttactagtgatttcatttgtgcttgctcttgcataacttctatttggtaccgtttcagtaaatgttaatgaattaataattgctgtttgatcagcttgcgatactgttgcattattcgaaatattggcaattcttactggattagcagccgttgatgatgttccaactcgatatttatcacgtaaaggtttaattgtgacattgaatgacgttgttgcagtattaccgcttgtatcatttgccaccaaattaattgttttatttgtagcagatgtcacatttggtgctgttgctgaaacatgttgatgattattatcaacagtacctgtcaattgtgatgtcgctggtactgttacagattgcacaccaaagttatcattcgctgtaatcgtattggtaaatgtttcacctgagaatacttgatgattagcgtaattacctactgagattgttggatttactaaatcactaggcacaaaataaatgttgatagcttcattcgtattgcccgtattctgatttaaatgttcaacatattgttttggtccatatggcgataagtataactgtgctttatacaccgcatcagctgcattatgcgtagaattacttttaaccacatgatctattgtaaacgcacctgcaccattagcagctggttcattgacactaacgactgtcgagttactgtggttcgcacgaacattagagtttgtaacgggttgtccaccaaatccatttgaaggattaatgatatctaacacttgaatcacttgaccattcaacgtaaattgacgttggccatcagtcgttggatttgattgtgaataacctgatgatttatagtttggtcttccaccagcttctgcttgtgctttttcattaccggcaatgttattacgtaatccagccactgtagttgttgcttttaacattgtcaaaatgtcattcgttgttatttgtgtacctaatgttgcatcataacgataaattaatgatttatggtcatcagaccaagatagaccaccatcagtcggtctatttgcaattttcgcattcgtccatgtcactgtataatcttgtgggaagctaatccatcgcaagaaattcatattagtaaggttagatgtgaacgatttcgttaggcgacctttattaatattgactgtaattgtacttacattagctccatttggtgtatttgttactgaaatatcaccttctgcaagcgtaattatatctctattcgcattaataaaagcttgttttacttttgaaatttcatcagtagttaaatcatatgttgacgtacgatatacacgttgatcgccctctggttgtttcacatcaatgatcttcaaactaatatagaagtcttcagtgtctttatgatatgcatttgaagcaactatatgatataactgcgtgcccgcattcatttgactaacttcttgtgcagttggaatcgttctatcagatgtaatatttgtaaatgttccacttggaataggttgtccattacttaaagtaaaatattgtttaatatcaccaatactaaatgattgtcctttagcaattgtaaccgttgccgttttaggtgcattcgcagtttggtattcggttttcacaactggttcatatgtcatcacatttgtcgcatctagcgcagttgatgagccatcacggtaatgtaatgtaacattgccatgatcatcgactgcaactggattagaagatgctaaataacctcttatattttgatttttattcataaaggcagtaataatgcgttgcttttcatcaccagttaaagcagttggatttacaacgacaactttttcagaatttcctaagacaattgggtgcgcatcatcactaattttacctacatgcactgtcacatgtttagactgactatcattcgtcgtattattgacattatcggttgctgacactttgaatgtaatatcactattaaaggcctgattcatactcactctaccagtaatagataatgagccattattcttatccgctttagttaaatttgatgtccaaccacttggcaatgtcgtaatagttgtactttttataccagaatgtctatcagagacacccatagtaaagctaacttcatcgccacgataatatttcgcatttaatccaactggattattaattgtcggtggaatatcatccggcaaaattgtaactgcattactcatatttgaggcaactacgttattgtagtatattaacgctctaatttgatgacctaccggaggtatgaatactacataatcttctggtcgtatcgttatcgttgaatgaaccccatcaggtgtccccgtcgcaattttcgtatagccagatggtatttgatcagcctcagaaccaccatctcttgtttgagacgtaggtataactaaatatactaatgctgaaggatctaatggaacccctgaaactgttactggtaccttttgtaatgctgtacctcttagttgctcagcagttgtagtaattgttggtgtatgtggtttaacacgaatctcgaataattgttctttacgtccaaatcgtattgttccaaagtaatcacccggtaataaattaccaaccagttcaatgttacgttctctggcattattagttctatttgttgaattctcaatgtgtaatgtacgtggaatacctgtaatttgccaatctttatctgtaaaattttcattacttgttaaattaatacgtaacggttgtatagatgttacactaccacctaagtttactgaagcattcccttgattacctgcatatacatagaaaaccggatgtccagcttgttttgaagctggtttatcagcaatattttggccgtcatcatttttaaagaatttgatgttatgttggatttcgggcaatactgttaagttaactggaactaacgtttcagcgttaccatgtccatctggatagtcaaatccaatcattagttgtattggcgttctatttctagcagcctgttgtaatttatcatcagtaaataattgacttatttgatattcatttaattcctgtacgccacctggtctacgaacattaggattggcattcgttggataaaaacctaatactttattactcggtgtcttaacgtaacttaaaggatcgtcgatgaaatcatcaatgtttaagtttgaactttcaagcacttttttagtttgtacattaccatgacttatctctactcgtttagttgtacctaagcgataagtacggttaacagtttgtcttaaaccattaagacgttgttgctggtcttgtgttgattcgacatataactggctatacataaataattgattgtattctaatgcacgaccccctgcagcataatacagcttatcaattgttggaccttgcgttttaaatgaaattgtataacttgcatcacctttaccgatgaaagtataaactctaggcacacctggtgattcagttggtctttctccattaatatattcgaatatttgtctaccaaaagctttagtagaagctggtgcaccagcttcactgaaataatcccctgcacgtgctaaatctttcaagctattaatatggacagttggccaatcatatattacttgtccgcttctatttctaattttaaagtcccacgaacgcgagtcatttacaccatttggccacatttgtggaagtggtttgttagcaccggctcctgcaccattactccattgtacatttgtaccgtctgcatttacggttacaaagtctgtacgtccaactggtacttgatcagctggtagtgcaaaccagtagatcatattttcatgtggtgcgtgacctttgttaaatttaatcacccattgatagccatctccagtttgcttcgctgtgataagtgcgatttcttttgcggcggatgctttcaatgtattccatggtgtagtaggtaaattatatggtgcccctttattagaagcgttgatatatgtaccaacaggataccctgaaccatcattagcattttcaacatagtaagaagagtctgcattttgataacttgataccgatctaggttcagccgatcttgattcaatcgaacgcgtttgaattctacttgagcgtcgacttgtttgttgacgttgaggcattgtacgaattagagcaacagcttgttctaattctttgtatgcaacttgcaagtctttattgtttattggatcattactacctaataatgtattgattttgtcaaaaatgccttttacatagttaaatgtcccagaatctgcattttcgcggtcaataaagcgataatcatggtaattagcatcaaaaaatgcttgtaattcattacggtcgtgttgtacgctgccactatctgatgaatctgaagctgtgactacatttgcttcatgattttctacatgtgttgcgttattgtcgtttccctttttgttagcagaacgactttcgttttgttcatgcttgctttccgcttttgccgattgcgtttgcgtcgcatctgccgtatctttcttagcttgctcattttgagatactggttgatcatgttttgtagtatatggctgtgctccacttgcatctacttgatttgtttgattattatttggttgctcattttcaataggcgcagataatgattgaccattttgtgaattttgagaattttgtgtttgcgattctcgattctcagtctgcgcatcaccattttgttgtttctgttttaatacactagccagttgatttgtctcagcagcttgtgcatgtgatgtgtttaatcctaaaaatactaacgtcgcaatgaccgttgagaaagttccaacggtatatttacgaatactaaacttttgaattttatcacgataattcacagctattgttcactccttatcttgttgttatgtctctgttgtgttgtgaatgtatttacatttgattgcatgtgaattgtaatgctcattccattctcatttaaaaatttaaaacaatgacgattcaatacaatttcgcaatctatttaaaaagtattgaaacacattgcaactatgtgttgaacaatttatttaagatccagaatataataacacaaaatataatgataggtaaattgaatttgtgacaatttataataattataaataaagtagtgtaaaagggtaataaaaaaccgaccttatgtagaatcatttataatgattacacataagcatcggtttattttttcgtgatgatttaatattgtagcgactgtcctatttttctaattcataattattgtcatgttgatacattctgctttggtacaaggaacataatgataatgaatgataatatacccatacctgcattcaaccatagtgcaatcattgcaccagtgtatatgtttgtaatgttagatacgatggcataaactgccccacttagagcaacaccaaatgcgccacctagcgcagacgccattttataaatacctgcagcgacaccaactttttctaaaggcgcattggcaatggccgtatctgttgatggtgtcgcatagatgccaagtcccaaaccaaaaaataaatatcctatgatacaacaaatcacgtaaacaatttctggtaaaaatgttaatgaaatgagacactcaccaataattaatacacccgttcctattaacatcggtttcttacatccaagggattgaagtaatttttcaccgacacgaatcatgatgagtaccatcactaaataagtaattgataaactacctgcttgcaatgaagaataacctaaacctcgttgtacaaatgtatttgctacaatcaacgttccagcgacaccgtttaataaaaagtttgaagctgttgcacctgtataagccttatttttaaataatttaaaatcaatcaaaggattgtcaacacgcatttcaagaacaacaaataaaataaaagtaccgattgaaataatcagtaagaagataaacagcattgatgttatacctaattctgcacctttggttattaaaacatttaaacttaacagcatcacaactaatacaactaaacctttaatgtcaaatttgtttattgatacatctttagcttttgtctcaggtgtgcctttaattagaaataatgcaatgagcgagataactatggaaataatgaaaatccaacgccaacctaaaagcgttgcaactgcacctccaaaaaatgaacaaacacctgagccgccccatgagccaattgaccagtaacttaaagcgcgttgtctatctttcccaatgtaatatgacttaataatagacaaagttgcaggcataatacatgctgctgaaagtccttgaattaatcttcctataataagtaataaaggaatatttgaaataatgattaataatgaacccaatatatttaagataataccaatgttcgtgagtttaattctgccatatttatcagcaagaccacctgctcctactacaaacattcctgaaaataaagcagttatactaacggcgatattaaccgttccaatatctgtgttgaaactatcttcaagtattggtacaacattaaccaatgattgtgcaaatagccaaaacgtgataacacttaaaacaattcctattaacaacttattattgccttcaaatgcctctcttgacggcttttccatttctatttgcctccctatacttttgaaaaacagacaaattccataacagaaatttgtctgttcgatagaataattgaatggttttcgattttaatgtgtaaaactttaaatttattagtagtccatccatttattctcaatgccaattgtcaaaacttatgccgctttttgtttctttttatagtaataaactggtataccaagtgctgtgattagaatcccaataattgccaatataaattgtgtaaacagtgtattaattaatacaaatgatcctgccaaaatagcaattaaaggtatgattggatataacggtactttatatggtcgctccatatttggttcacgttttcttaaaattattacagcaacaaatgacatacaatagaacaaccaaataacaaagattaacatgtttgtaattgtatcaaatgcccccattgacatcatgacgattgcgattaacagttgaataattgcgccgaaccatggtgcacctgattttgttaattttgcaaataaatggctaaatggtaataattttctttcagccatagcataaggcacacgcatacctgtcatagtatagccattgatcgtaccataaacagaaattaatattccgattgtgataattttaccgccgtattcaccgaataatatttttgatgtgtctgatgctgcatttaaattacctgcaagtaattcaataggtaatgttaataagaatgtagcgttaattaataagtacacagccataatacaaccgatacctacagaaatagctaaaggtaaatcgcgttttggatttttaagttctcctgcaacattacctacatgaatccagccatcatatgcaaacatagttgctagtaatccactaccgattgctgtaaagaaaccatttcctgaattaccagtagtcggaattaatgagaacgtaatgtctcctgattggaaaataccaaaaataacgataacaataattggaattaatttaataactaaggtaacagattgtaaaataccgcctgctttagaaccaaggaaattgatcaacacgattgataaggccgaagcgatcgcaattggtattaaagaacctgccgataaatggaataaattaattaattgagtcgcaaatacgattgataaggctgcgacgtttgctggaaaataaataaatgattgtgcccagcctgataggaagccccagaaatcaccgtatgtatattctatatactttgttaagccacctgtttcagggatcgcagcagcaagttctgctgctgttaaccccgcacaaatggtaatgatgccgcctaggaaccatacaaacaaggccattcctgctgttcctgttacttctgtcacgtttgatattttgaagaacacaccagaaccaatgactgtccccattacaatcgcaaacgctgagaagaaacctatatttttttgtaattctttaccatttgacataattacacctcatttttcagattaaatgttttaacctaccacacccttgcttgtatctgcaatatttagtccatgttcaatgacacctgacactctagttaagtcaacgtttccgcctgaaactaatgccacaacatttttatcctcaagccattttttatcaattttcccacttaaaattgcagcagtcggcaatgcacctgcaccttcagtaataattttggcacgttgcattaaatctttcattgcatgttcgatttcttcttcagtaacaagaataaattcatctactaaatgtttaactacctcatatgtttgttcaccaggaactttgacatcacaaccatctgcaattgtgctatcatcacgatgctcagttaaatctctcttatagaatgactcagccataccgtgaacattttcagattgaacaccaataatatgaattgaaggattgaaagattttaacgcggtggcaatacctgcaattaatccaccgccgccaacaggtacgattactgtattcacattccaaatatcatctaaaatttctaaaccaattgttccttggcctgccattacaaacttatcgtcatatggatgaacgattgtcataccattttctttcgctaattcttccatataaagtctagtttcgttaaagtttttaccttttaaaataacttgagcaccatagccttttgttgcttgttgtttcgcttgtggtgcggtttcaggcatcacgattgtggcatttatacctaatagttttgctgttaaagctacgccttgtgcatggtttccagccgatgcagcgataatacctttttctttttgttcatctgttaaatgattgattttgttacttgcacctctgaatttgaaagatcctgtgaactgcatattttctaattttaaaaacacattacctttagtgatactttgacttaaatacatagatttaatgagtggtgttcgtctaataaatggtttgatgcttgctttcgcttcttcaatatctcctaaacttacaatgtgtgctgtttgtaatgtaactgtgttggttgtcataatgattacatccttccgttttgtaaatttttagtccatactatattgctttatttaaaatattcatttcacgctcattcaagtaaatgggtatttattcaataacatccttaatctctttaaaatctaaatcatgtgatgaagctaatccttggtttgtcacttgtcctttgtatacgtttacaccagtacttaacgcttcattgtccttgattgcctgttctaggcctttgtcgcaaatttctaaaatataatcaatattcccttgtgctaatgccattgttgacgttcttggaactgcacctggttggtttggtacaccgtaatgaattacgccttcttcttcatacactggatcagaaattgtagttggtttgattgtttcaatggttccaccttgatcaatagctatatcgattaaaactgaaccttttttcattgatttaaccatctcacgtgtaactaattttggtggttttgcaccaggaattaaaattgtcgaaataaatacatctgcttttttaatttgttctgctaaattttctggtgttgatttgactatagtgacatctttgtctgcatacatatcttgtaaatatttaatgcgatcatcgtttaactcgataatgattactttagcattgagtcctaatgcaacattggctgcgtttgttgctgctacgccaccaccgaagatgacatatgtacttcctggaatatcgacattgtcatgtactcctgtcactaatgtaccttgaccaccgtgttgcgcttcagaatagtaagcacccataattgctgaacgttgacctgctattgcactcatcggcgctaataattcggctttaccatttttaacaatggtttcaccactaattgcagtgacaccaacttcttgcattttctctacaatttcttttgaagatgctaaatgtaagaatccccagatgatttggtcttttttaaaatattgatattcacttttatgaggttcttttactttgataacaagatcagcttcccatgcttgttcgtgagttacgatcttagcgccttctttttcatacatatcattagaaaatcctgaaccaatgccagcatttttttcaacaattactttatgtcctgcatccgttaacttacgcacattttcgggtgtgcaagctacacgtccttcaccttgttttaattctttgactactgcaactaacatttgcaacactccttttgattttgtgaattatttcacaatcattttatcttgtgggtatgcatatgtaaataccattaattaattattcatattttatctataatttgttaataaagttttaatatataattcttaattttaaatataatgtgcaattctactactatatttatttcttatcctcaatacaatttatagttgtatttatacattgactcaaaaaacaaataatcaaatctgttttattaagcaataaagttgtatttatactagtttgttgtgtttggtaattttatgaaactttctcaaatgaatgaacactctgaatggttgttcacatttttataattagtctacaaacgttaaaaatgttactattccctttcaatttttcaaatgagtatatgaatcgtactatgtatttcagcattggataaagcgttattagtttagtcgcttccggtataaaagcatatcgcctttatttcaaccgcaataaaaacataaaaaaaatgacaattcctactacactgagataagaattgccatttttaaatttagtttgattcataattcatagatttatgtcatgatattaaaaatgggatgaaatgtattttccagatacatgtaattcatattcgttacaaatcgataaaatatgattaagtgttgttgcaaatgccattttttcaaaaagcgattcactatcaatcggtacttgtgtgtgaatttcagcaagtcgcttcgataaatatagttcatctaaattgtcattaatcttattacgttgcccagctgataatgcatcgatattttcaactacattttcaacactttgatattgctgaatgagcttaattgccgttttttctccaataccttttacaccagcataaccgtctgctgtatcacccataaacgctttaatatcaattaattgttgtggttcaagtgcatattcttcattaaaacgattcaatgtatatctattataaatgttaaaaccttttttaattagccaaacttcaacattgtcattaatacattgcagtaaatctttgtcgcccgtaataatatagacatcgttatcagttgaatattgtcgtgctaatgtacctataacatcatccgcttcatagtttttaacgccaatatttacaaagccaaattgctctgaaatttctttaacataatcaaattgtggtatcaattcttctggtggtgcagaacgattttgcttataaccatcaaacatatcatttctaaaagttgattgtcccatatcccaacatacagctacatgtgtagggcgtatttcatgtattgccgaaaagatatgacgcacaaatccttgtattccatttgtaggtacaccttgtgaattgtacataaattgtttatgaagacttgtagcatagaaatgtctaaataatagcgccataccatctacaagtaatattttattaggcatttaaaacgttccttctttcttaatataaaatagttttcagttgttgatgtttatctttcaattgattgataagtgttgtatctaaatcaaatgctaataaatcgtttatttgcgtttgaatattagcttcaaaactttcaaattgcgattcagcttctacagccatttgctttacatataattcaagctgttgcctcaataatcccatttgtggttgtaataatcctaacgtactttgacaaattgattcatgtatatctctttgcccatttggattcaaaattttacgttttgttaattgttttggcaatgcatttagcatatcgttgaaatcgatgtgcaataatggttgcactatattagctgattcaaagttaaactgaggattaacaataacatgtaaatctgctaattgttgaacgattggtgcaatttgctcagtaagttgcttattaaagtatttttttatacgttctgtaattaaagattgctctaaaaacaatcgttgatgaatttgatctaagtatactttcgtagacactttcttttcttcattaaaatcactattttgtgtcatttgagaattaaacactgatttaacatcgtcaagtagttgtaattttaaacgtgcatttaaatgataaacttgttcttcaacttcgttgtctgtatgttgtagcgtcgcatcaattaattgatgttgtaaacgctgtttatctttatagactgttaacctttgttggcgacgtgaaatatcagctttatttgtttcaaattctgtaatcatctctacataagaacgatccatttgttgaagctgatgaatcatttgttgttctaaaattgatttagattcaacatcaacaaattgttgtatgctttgttttaatttatcaatgcccttatcttcagcttgcaatgcatttcgacttgatacagcaaaaatgtctgattgcaagtttacttgtcttaatgcatctgatacatatgtttcaaccgcttcaagatcatcttgactttctgctaaatcagcagcattaattaccattttaaaagcttgattctcattcaactgattcatatctttcatatgttctataaacgccttgtcattatcagtaaatgaatgattaaaataacttacatacaatattaagtctgaagaagttaaaatttgctcggtttcatttgtatgcctttggttatttgagtgtagccctaatgaatcaacaattattttaccttttaaccaatcatgcattaatgcaatgtgtactgttttaacaaatgttgcgtattcatcttctgcactccactttttcaattcttgttgattaatggcatgtttctctccgttttccaacatattgacatacaaattataatgtttttcaactgcatgaacaaaagcgagttgatttttatttaaatgtgattttaacttttctaaatctgaattaataaagtcttctatagttgaaaaagatatatcttggtattcaactactgcattaatttcatctaataattgcgattgtgattttagcgttatataactctcgtctccataagatatttctgtagtagctgctgtagtaggatttggagaactaactaaaatatgctcacctaataatgcatttatcaaactacttttacccgcactaaacgttccaaatacacctatttttattaatttattatctatacgtgttaatgtttcgtggatatcctgctttgtacgcttgaacaaaggcacatccgaaattatatcaagtgctttttgaatatctatagacatatttgttgtagctgtattctgatttagctgctgattatcacgattatcctgagcattatcagtagccacttgatatgttgtctcttgtcgatctactaatttatctagagattcatctaaatgaatatagtagtgacgataattcttagtcgtcaatgactgacgcagctcatttaattctgtataacgttgatattcttttaaatcatcactttcttctgttggtaattcatctgcctgcacatttactataatttctttaaaaatcggtgtcgactgttgttcaacgtatttcttaatggctttaaccacttcgtctgaaaatgtaagtacataagtattgctgattgatgtttgtggttgatataaaccttcaatcatttccggcttaacgtcataatgctgatttaatactttatctgaagcatcttttttattgataaaacgcgtaacaaatgacatatcttctcgcattggttgacgaatttgttgattaacatgttcttgtaacgcatctgtcgctgttaataatctctgttgttgaatttgtagctttttcttctttttattaaaaaggccgccaacattaaagtcttgagacatactttccaaataacttcgtaacatttctctcatattatgcggcataatgtatgcattttctaaaatatttttacgcttattctttaaaaatgccattaattcatctggattatttaaaagttgcgcctcttcactaattgcttgatgttgttgactatttaaaaatgcttgttcaaactctgcttcttcgatacctaaatcttctagtacttcctggatttcagactgaatataatctagctgagcttcggtaatatattcaaccgttcttgatgtataatcctcaattgtctctctatcttgatctaatgaaactagatacgttgataatgcttcaagttcattttcagggtgatcaaatttagatacataaaaggtgcgttctaatttaatgccccaatctgcaattgatttttcaactcgagatttaaacgtagagaatgacaattcatcgtcttgatgcttgtcaatttgattaatgataaacacaacaggtattccaacatcatttatatgcttcataaacttaaagttaagttcagattgaacgtggttatagtcaaccgtataaaatatcatattacttgtatacatatattgttctgttattgactgatgtgatgcaacatttgaatcaacacctggtgtatcttgcaacgtaaacccattttcaaatttagctgattgaaaattaatttctacagattcaacgtcgacattttggcgattcatttcccttacttcatcataattagataatttggcatacgtttgattcggcaaattagcaataatatcgtgattgtctgaaactgacacgatagcagtattacttgtcgttggtacaggtgaacttggtaagatatcttgttcaattaataaatttatcagtgtcgatttacctgcagaaaaatgtccaacgaacgaacatgtatattgctgcaaatatactttcttaattacttggttaattgtatgtaaaagtgcttcatttcgcgacttttcaacttctttttttaatttatataaaagatctaattgttctttattaatcatgttactttcccctttggttcgttcacatagaaatgcttgcttgttaaaacgaattcatacaatatcgatgtccatttaaacataaatcgttaaatggctcgcattgtattatgtttaaattttatcatagctgcttgataaaacatacgaataatcaattttcttcaaacattccaacttaaaagttcatttttctaaaaatcacaaatcatcgttaaatttttctagaaaataaatattgtcacagtttgttcacacacgtcacagaattgacaccgtataatagccaattgggagggaaatatgaaaaatacatttaatccattacaaagattacatttctacgcagcaatatttattgctccactgttaatcactttaaccatttcgggcattggttatttgttctttccagaagttgaaaataatatttataagaatgagttttttggtgacagtaatgtcaaaacgcatcaaacattaaatgatgcagtacatcaagttgaacgacaatatgaaggattctttgtaagtaaagttagcatacttgatgaaccatataacaagcgaattacactgagtgatatggcaggaaatcagcgttacgtctttctagatcataacaatcaatttgttgcagatcaaaatgcgaaacatacgtattctaatgtgatgcgaagtatacatagttctttgtttactgaaaatactattattaattatttagttgagttaaccgcatgttggacgatattcatgattttatctggtacttatttactcattaagaagcaattaatttctaacaaaagtaaggcacttcgttggcaaaagtggcacgcaatgattggagttatcattgcaattccagtatttgtattagttttaactggattgccatggtctggttttatgggcagtaaaattgccggtatgatggacacaaacggtgatcttggtcaaggtgaattagcgattaatccacctaaatcagatttgaatgagttaccttgggctacacgtaaaaataaacagccagcttcatcggaaaaaggttcaagtagtcatcatggcaatgcagcaatgcctcaaaccaaattagattatcaaatatctattgataaggtcgttgaacaggcacaaaaatctggtattaaaaagccgttttcaatcgtatatccaagtgataaaattggcacctttattgtatctaatactagtaattcaggtgttactgggctagatgtatcaccttacaaggaacaaacactttatttcgatcaatatagcggtaaaaagctaggtacgattaaatatgatgactacggtattattgctaaatggtttacatggggcattccgcttcacgaaggtcatttattcggtattttaaataaaatcattaatttatttgtatgtatcgctttattagtagccattggtatgggatttgtctcttggataaagcgtacaaaaaatactgcagtaaaagtaccacatcgcgtaaaaaaaccagcatctatatcactcatcatatgtttaattgtattaggactattaatgccattatttggattatcacttatactagtatttataattgaattaatattatatgttaaagatcgtcgtgctaaacaataatgcacttaaagttttgaactgacgaaatttacaaaatgattctcgactctctaattacttaaaacgggttctataataaatcggacagatgaaaagttttttacttttcatctgtccgattttttgaatttgaagataaaaaagcatctaaaacgtataagaagattacttcacttcttccaaattacgttatagatgctttttattaattcatatgcatgtcgtgaattttcatcattaaaccgtgtgggacgtcatcatgtttaacaatttcttgtttataaaatgtcttcccatcatctttagaaactaattttacaaagtctccttttttcggtttaaaatcatttgatggttctactttgatattatgtttgactaatccatctttttcgctgacaactttttctgcatttgtattactattcatataaccaaaataagtcgttttttgactagaaaaaatcattaaacatacaacggcaataccaataacaaccaatgctatagataaacctagacccatttttttacccatttatagactcctccatttttcaaaaatacctattatcatgagaacataattattactaattttagtcacgcattagaaacactttagttttcaatagttttacgttctgtctttttaccccagtattgataataagtacattctatatatccattaaataacttacgtcgcttcgttgctttacgatctactaaatattcaaattctttattacttgttaaaatgtatgtagataaaaatggatgttgtttcattagtttaccaatataacggtacatttcttcaacttcttcacgatcaccaatacgttcaccatatggagggtttccaattaacgccaccggttcttctgtatcaattgttaatgtattgacatcttttacactaaatttaataatatcagacaatccaacttcttcagcgttacgcttagcaatctctaccatttctggatcgatatcagaagcatatacttcgatttctttatcataataagccatcttatcggcttcatcacggtaatcatcataaatatttgctggcatgatgttccattgctctgatacgaactcgcgattaaaaccaggtgcgatattttgagcaattaaacaagcttctatagctattgtacccgaaccacaaaatgggtcaattaaaggtgtatcacctttccagtttgcaagacggattaaacttgctgccaacgtttctttaattggtgcttcaccttgtgctaatctatatccacgtctgttcaaaccagaacctgatgtatcgatagtcaataaaacattatcttttaaaatggcaacttcaacggggtatttcgcacctgattcatttaaccaacctttttcgttatatgcgcgacgtaatcgttcaacaatagctttcttagttatcgcctgacaatctggcacactatgtagtgttgatttaacgcttctaccttgaactgggaagttaccttctttatcaataatagattcccaagggagcgctttggtttgttcgaataattcgtcaaacgttgttgcgttaaaacgtccaacaacaattttgattcggtctgctgtgcgcaaccataaatttgcctttacaatcgcacttgtgtctccttcaaaaaatatacggccattttcaacatttgtttcatagcctaattcttgaatttccctagcaacaacagcttctaatcccatcggacaaactgcaagtaattgaaacatatatgattctccttttatacaggtattttattcttagcttgtgttttttatacatttccaacaaatttaatcgctgatacgttaacgcatttgcttatcattttaaaacaaggcagtgtcattatatcaagacaaggcgttaattttaagtgttcttttcatgaaaaaagctctccatcatctaggagagctaaactagtagtgatatttctataagccatgttctgttccatcgtactcatcacgtgcactagtcacactggtactcaggtgataaccatctgtctacaccacttcatttcgcgaagtgtgtctcgtttatacgttgaattccgttaaacaagtgctcctaccaaatttggattgctcactcgaggggtttaccgcgttccaccttttatatttctataaaagctacgtcactgtggcactttcaaattactctatccatatcgaaagacttaggatatttcattgccgtcaaattaatgccttgacttattgtttcatcaagcacgaacactacaatcatctcagactgtgtgagcatggactttcctctatataatatagcgattacccaaaatatcacttttaaaattataacatagtcattattagtaagacagttaaacttttgtatttagtaattatttaccaaatacagctttttctaagtttgaaatacgttttaaaatatctacattatttgaagatgtatttgttgttgtattattcgaagaaaaacttttattgtcctgaggtctagatgttgctacacgtagtcttaattcttctaattcttttttaagtttatgattctcttctgataattttacaacttcattattcatatcggccattttttgataatcagcaataatgtcatctaaaaatgcatctacttcttctcttctatagccacgagccattgttttttcaaaatctttttcataaatatcttttgctgataatttcaatgaaacatctgacattttttccacctcattagaaactttgatcttcagaccactgtaagtcattgatgaatgctgttaattcatcgaacgtcacaatatcacaagtatagtttgttttatccataaaatcaactaacttctgcttgaagaacttaggactcgcctcttgttcctcatcataaatgagcaatgtttgatccgaatgttcaagcataaattgatctgcttgtttaaattgaaagggaccttgatacgacgtatgaaaaatactatcaacataatctgcatacttaattatgttggcatacttactttgattatgttcattccacttttctgtatgtccttggaatggtgtaattacagcaaactttaacgaatcatatgttcgttgtaattcaataacaacttctgcagtccataattctatacccatttgcccttgtattaacacccattctaatccttcatccaacagttgttcaattttatgttttataaattgttttaaataatgtacttcaggtgcgtcatctttaaaaatgtttaattcgaatgatttataacctgttacataaactgttttaaccataagtaccctctttagttatgccatctaatatattttgtaaatcatattgaacgcttttaagcttttcaataaataactttcgacttgttcgcttaaaatgacattcgacagaaagttgttcaatgttagcaatcagtagctcaaatttccttgaattcatataaggtacttctataataaattcacgatgtaatttgatttcattgagcaagctatcaatatgttcagtatatggctttacagtttgataaaaatcatgatcttgttgttgtgatttcacattttcaaaattttgttgcatattgctaacttcataaattagtgattcgactacatcattcatgaggacgcctcctacattttttaatttatcacaatatactgtattcgtcatgttttaacactctatctaatttgatttaactgttttctaatgtgttatctgttaaatcaagtaaacccaaaaacttcctatataaatataaaaatttatcgtgtatgttgtcatacgatgaatatactttgtaatctaataaaatcatttaaatcaaatacacctctgctgattaactacacatacttgtacttgtctcaaaaataataattactgatcatgatttgacttttataacaaaattcaaaaatattgtaatgagtattcatttttataagcaaaacttttcaatcaattaaaattgtgtgtaaaattccaacattaacggtaaatgtattataatattattgtgttaatgctgaaatcacgttaaaataagctttggtgtattgtgtctttcgcatttatactaatttaagtttggtgtttcactataatgttgtgtataataaacaacgtttactaccaaacttgtgtggtgaaatttatgaattatccaaatggtaaaccatatcgtaaaaatagtgctatagacggagggaaaaagaccgctgcctttagtaatattgagtatggtggacgtggtatgtcacttgaaaaagatatcgaacattcaaatgcgttttatcttaaaagcgacattgcagttattcacaaaaagcctacgccagtacaaatagttaatgtcaactatcctaaacggagtaaagctgtgattaacgaagcttattttcgtacaccttcaacaactgattacaatggcgtttatcaaggttattatattgattttgaagcaaaggaaactaaaaacaagacgtcctttcctttaaataatattcatgaccatcaagtcgaacatatgaaaaatgcatatcaacaaaaaggtattgtgtttttaatgattcgttttaaaacgctagatgaagtttatcttttaccctattcaaaattcgaaatattttggaagaggtataaagataatattaaaaagtctataacagttgatgaaatacgaaaaaatggttaccatattccttatcagtatcaaccaagattagactatctaaaagcagttgataagttgatattagatgaaagtgaggaccgcgtatgacggaaaacaaaggatcttctcagcctaagaaaaatggtaataatggtgggaaatccaactcaaaaaagaatagaaatgtgaagagaacgattattaagattattggcttcatgattattgcatttttcgttgttcttttactaggtatcttattgtttgcttattatgcttggaaagcacctgcttttaccgaagctaaattacaagatccgattcctgcaaagatatatgacaagaacggagaacttgttaaaacattagataatggccaaagacatgagcatgtaaatttaaaagacgtgccgaaatcaatgaaagacgcagtacttgcaactgaagacaatcgtttctacgaacatggcgcacttgattataaacgtttattcggtgcaattggtaagaacttgactggtggatttggttctgaaggtgcctcaacattaacacaacaagttgttaaagatgcatttttatcacaacataaatctattggacgtaaagctcaagaagcatacttatcatatcgtttagaacaagagtatagtaaagatgatatcttccaagtatatctaaataaaatttactattctgatggcgtaacgggtattaaagctgctgctaagtattactttaataaagatttaaaagatttaaacttagcggaagaagcttatttagccggtttacctcaggttccaaacaactataatatttatgatcatccaaaagctgctgaagatcgtaaaaacactgttttatacttaatgcattatcataaacgcattacagataaacagtggcaagatgctaagaaaatcgatttaaaagcgaacttagtaaatcgtactcctgaagaacgtcaaaacattgatacaaatcaagattctgagtataattcatacgttaactttgtaaaatctgaattaatgaataataaagcattcaaagatgaaaatttaggtaatgtattacaaagtggtattaaaatttatacaaacatggataaagatgttcaaaaaacattacaaaatgatgttgataatggtagcttctacaagaataaagaccaacaagttggtgcaacgattcttgatagtaaaactggtggtttagttgctatatctggtggacgtgatttcaaagacgtcgttaacagaaaccaagcaacagatcctcaccctactggttcatctttaaaacctttcttagcgtatggacctgccattgaaaatatgaaatgggcaacaaaccatgcgattcaagatgaatcttcatatcaagttgatggttctacatttagaaactatgatacgaagagtcacggtactgtatctatttatgatgctttacgacaaagtttcaatatcccagctttaaaagcttggcaatcagttaagcaaaatgctggtaatgatgcacctaagaaattcgctgccaaacttggcttaaactacgaaggcgatattggtccatctgaagtacttggtggttctgcttcagaattctcaccaacacaattagcatcagcatttgctgcaatcgctaacggtggtacttataacaacgcgcattcaattcaaaaagtagttactcgtgatggtgaaacaatcgaatacgatcatactagccataaagcgatgagtgattacactgcatacatgttagctgagatgctaaaaggtacatttaaaccatatggttctgcatatggccatggtgtatctggagtaaatatgggtgctaagacaggtactggtacttacggtgctgaaacttattcacaatataatttacctgataatgcagcgaaagacgtgtggattaacggctttacacctcaatacactatgtcagtgtggatgggcttcagtaaagttaaacaatatggtgaaaactcatttgtgggacatagccaacaagaatatccacagttcttatatgaaaatgtgatgtcaaaaatttcatctagagatggcgaagactttaaacgtcctagctcagtaagtggtagtatcccatcaatcaatgtttctggtagtcaagataacaacactacaaatcgtagtacacacggtggtagtgacacatcagcaaacagtagtggtactgcacaatcaaataacaatactagatctcaacaatctagaaacagcggtggattaacaggtatattcaactaatccactcaacataaaatcctcagttataccatatttatggtgtagctgaggatttttttataagtattcatacgctattgctatattagtagaaaccgtaaaatcagtcattcacatatattttgaaacatctaaacagttttcatatgcacatctttagctatgtaaaattattgaatttgaataagtggttgttcccatttttaaaattatgattatattttctcatagtcatcttagacgctgttttaaattgatatgtttatcaattcccggagcacgttaatcagtaaaatatcaacatgtttgaaatgtattttcataatcataaatataagaaatccacctacgattcgaaatagatatcttaaaccatacctcaagatatccattatgatgtagatggacagttattatattaagacgttataatgacacgacacctaacataaatacaaatatgtgtgcatgaattagttttacatattttcaatattaggaaatgatcaaacttatctatacctgcttattctttaatcttgtttgataactagcattcattttaatcaattcagttttaaaggtcttcatttgtcgatagcccataaaatgatatttacgttcaatcatatattcatatctttctttaaaattcattggcacaacaggatattgatttaaattatcaaaatcaatattgccagttatgtcattaacctgcttaaaataatcaataattttactatggtattcatccaagtagggctttgcttcactagaacctaatgtcttatttttggcaaatacatcaatctcttgttctaaattatcaaatacctcttttgtaatatttgtcatgttatcacgcttctttcaaactagctttataacgtttttgtccttctctacaatcttctaataatggacaaatatcgcatttaggttttcgggctaaacagtggtatcttccaaagaaaatgagttgatgatggctcctattccatctatctctaggtatgacagaacataaacggtcttctacctgtctcacattatctttccaacgattaatacctaagcgtttagaaacacgttctacatgcgtatcaacagctaatgaaggttcatcaaatgctacactcatgactacattagcagttttacgtcctacacctgctaaactttctaattccttatgtgtttgtggtatttctccattaaattgatcaatcaaagattgacaaagtttcttaatattcttagctttgttacgatacagaccgatggaacgaatatcattcataagttcttcatcactgactgctaaataatcttcaggcgttttgtattttttaaacagctcagttgttactctatttactagaacgtctgtacattgcgctgacaatagtacagcaatagttaattcgaacggattatcatgttttaattcacattctgcatccggaaacatatttgctataacatcaatcatttctaatgcttttttcttacttaccatcaaggttctccccgtttaaccaatcaaatttaggtaccgttttaactgtgtgcgtcattttcggtttattaaatttttctcttatttttctagaatcgtcaattgttttgacattgttttttttccaattaagtaaaatacgatccatatatttaaagctaagtttattcaaactattcgcctcgtctaatgccgcttgtataattgcagtatcgtgtctatcaacatcaatccattgatttaatgtttctatttcatatggagataacggccttgcaaatgtatcctctaaaattctaaataattgtttaaatttttctttactattttgctctttcgtttccatactttgttgcttcaatatatgacttaatttttcgaaaaaaggatctagattcatatattcggtaaatctaccttcttcatctttttgaacttgtaattctagcaattcacgttgaatcaaattttgaataaccattgtaatatcacgtggttgcatagttgagcccttctgaagtaattcaattgaaggctgtttgtttgatgtttcggaagcataaatcaatttaagcaaaatgactaaatcttgctcatctaaacctaagtcactgtaatggtctaatagttctcttcgtatcactacaggtcttgcttttaattgatatttatccatgttcgtgcccccttttaaatttaaccattacttaatagtataaatcattttctttaattttcgactaaaatgcttaatatatttaactagtagcaaacaaattttaaataaccgtatttttttaaaactagattttaacaatgaactttatgtataatcagacgagctatttattttccaaatatagttactaaacaaaagtttgttcatcattaatataagccgttatcaatctacattttccaagcataaatcgcccagctattaatataggctggacgattctttttattatcataatataaattttaagtaacgaccctaaaacttatggatataaacggtttaataatcttgggaatggcgctgtttcacgaacgtgttcaacaccagaaatccatgctactgtacgctctaaacctaaaccaaatccacagtgtggcacactaccataacgacgtaagtctaagtagtaactatatgcttcttcgtctaatccatgttctttaacgcgttgttctaacaattctaagtcatccacacgttcagatccacctataatttcaccgtatccttcaggtgcaattaagtctgcacataatacagtttcttcattctcaggatttggttgcatatagaaaggcttaattttagttggataattagtaataaacaccggtaaatcataatgattagcaatggcagtttcatgtggcgcaccaaaatcttcgccccattcaatatcatcaaagccttctgcttttaagaattcaattgcatcatcatatgaaattctagggaatggtgtcgcaactttttcaagttttgatgtatcacgctctaacattttcaactctagtttacaattttctaaaactgattttactacatgtgttacatattgttcttgaatttctaaactttcagcatgatttgtgaaagccatttccccttcaatcatccagaactcaatcaagtgtctacgtgtttttgatttttcagctctgaaagttggaccaaatgaaaatacttttccgtgtgccattgctgcagcttctaagtataactgaccactttgagataaaaacgcatcttgatcaaagtatttagtatggaataattcacttgtaccttctggtgcacttgctgtcaaaattggtggatcaacctttgtaaatccatctttgttgaaaaattcatacgttgcacgaataacttcatttctaattttcattacagcatgttgttttttagaacgtaaccataaatgacggtgatccattaagaattccgtaccatgatttttaggtgtaatcggatagtcatgcgcttctgaaataacttcaattgacttcacttgcatttcgtatcctaagtcagaacgattatcttctgtaattgtgcctgtaacatatagagatgattcttgagtaatttctttcgcaagtttgaatacctcttcatcaacttctgatttaactactacgccttgcataaagcctgttccatcacgtaattgtaaaaaggcgattttaccacttgaacgtttatttgttagccaagcaccaattgtaacgtcttggtttaaatgatctttcgcttgtttaatcgttgttttcataaccattctcctatttattttttcgttatacaatactcattcattttaacaaaatccgctttcaagttctagaactagactaaaagataacgtgtaaatggtaatgatttaagcacagatttgaacattaatttatattaagacaatacaatcatcagtttcagacaaaatatataataaagcctcaatattattagtatgaaggtcgttttttgtgccaacattcaagtttaattataaaactcaaattttgacgaccaaacaaaaattcttgtaacagaacatagcacatgtcatgtcacaagaattttactttgtattttactttttcttcttttgaatttgtcttaataattttccaaactgttgaatgtcaccttttttctgacgataattttcaagtgtttgttcaaaaaagtttttataattactgtttatgagtcgatcatcaaatgaaactattataccgcgatcattttcatttctaattaatcttccaagtccttgtctaaaacgtgtaactgcatcaggtaatacatattccttgaaagttgaagtgaattcagaatccataagccaatattttgcattatgcttgttcataaacggtaacttcgctatcatcacacatttaataccttttgcttgaaaatcaaagccttcaaaaaatgttgacgtaccaagcagtatggccttatcaaaattattaaactgttgtactattttataattttggttctgctgttgtgttaacacaacataatcttcaaattctggcaattcatttagcatatcttgtaccatatgcatcattttataactcgtaaataagactaaacattttgatgacgttatagtcgtatattcaataatatagcttacaatcgatgctacatactcatctatatttttatattgataagatgctacatcactcggtataaaaacacttgtattttttgcactttgtaacgacgtgttaacttcaaatgtattaaagtgaacatctttgttgaataactgtttaaaagcatcaaacgaatgattaaattttaaagtaccagatataaaaataagtgatttaaatttttccaatacttgtttcgttaatacatcttttacagcgtaatctttcacatataaacgtattgttgatttttgagataaatttttaattgaaatgaaactagtatgtccagcttttaaactttgttcgatatttttaaatttatcttttaaatacaacaactgtttccgtaatgatttaactgttttatgactaatgccattgaatatttctagcgttttatttaacttatcgataatcgcatgtaaatccttcaaaatgtcttttgtttcaaaagtaaatacattatggaagcgatgaatatcatcatcataaacatcagaatcattgataatcgtaaatatcgttgagaacaattgctcatttaactcatgaatctcattcatactagccttcaagccaaaaatatcaattggtgcaatatctaatttttccaaaatccgctgcttttccagttgatcaattgcctttaacaatttttcattttcgtttttaccaatcaaaccaagctgatatttaatatcagcataactcaactcatttgtcacttgatttaaggcatagtctggtaagcgatgtgcttcatccactatacaatcatcaaacaattgatatattgaattttcaacatcagaatgaattaaatgtgcatgatttgtaataccaatttgaatgttctgtgcatttcgcttaataaaattataataatgaacatcgtgacgtgccggtacatatgtttcaattttctggtcaaaatacatcttttgaccaccttttaaatttaattcctgtatatctccggatggcgtctctgtaatccaaatcagcaattgcattttcaagatattcacttcgtaattacttgtgtcatcttttaaaatttgactaataagtcccaatgaaatgtaatcacttttacttttaatcaatagtgcattaattttaaaatttaacgcttcattcattgctggaatatctttttctaacaattgactttgcagtaacttggtattggtagaaatcatgacatgtttcccagtttcaatattatacatcaaggccgcaagtaaatatgctaatgatttaccactgcctagtgatgcttcaatcattgctttttcactatgcatgagctgatctaatatagtttccgctaaatataattgctgtggtcgatatgttaagccaagttgatctacagctttgctatataaagacttcaaactgccattataatttgttgtcggctttttaaaatcaacttgcttacgatagataatctgttcgaacttttcgtacgatttatccaatggctttgcatcatattgcctaaccatctcaaagaaaatatcatacaaatcgtatttcaactgtttacttaaataatatagttgctttaaagtatctaacggtaacttttcaaatttttcaaaagctaaaatcatcaatttagcagtagtagcggcatcttcgtcagctcgatgggcatttgctaaggtaataccatgtgcctccgctaattcacttaattgatagcttttatctgtaggaaaagctattttaaagatttctagtgtatctataacttttttgggacgatattgaatattacaatctttaaatgcctttttaataaaatttaaatcaaaatctacattatgagcgacaaaaatgcaatcttttatcttatcgtagatttcttgtgcaacttgattaaaatatggcgcttgttgtagcatcttttcttcaatggatgttaacgcttgaatgaatggcggaatctctaaatttgttctaatcatagaatgatatgtatcaataatttggttattgcgcacaaacgttataccaatttgaatgatatcgtcaaaatctaattggttgcctgttgtttccaaatccacaacggcataggttgccatacccatagctatctctccttgctttagtgttaaaaatctatatctgcactaattaaacggtgtgattcacccgcttcatctctaacaattagatagccatcgtaatctaaatcaattgcttgtcctttaaactgtttatcattttctgtaaatagcaacgttctattccaaatattagaagctgcaatatattcttcacgaatttcagaaaaaggtatcgttaaaaattgattatatcttttttcaatttcttgaagtaatctctctaaaaattgatatctatctaatttatttttatcatgtaattgtatacttgttgctctatgtctaatactttcatcaaagttttctagttgttgcgtcaaattaatacctataccacatattattgcttctataccatcattattagcaaccatttcagttaagaaaccacacactttaccattatcaatatatatatcattcggccatttcactttgacttcatcttgactaaaatgttgaatcgcatctcttatccctaatgcaataaataaattaaatttagatatcattgagaatgcaacgttaggtcttaacacgacagacatccaaagtccttgcccttttgaagaactccaatgtctattaaatcgcccacgacctttcgtttgttcatcactcaagataaaaaatgaagattgatttccaacaagtgactttttcgcagcaagttgtgtagaatctattgaatcgtatacttcactaaaatcaaacaaagcagaactttttgtgtattggtctattataccttgataccaaatatctgggagttgttgtaataaatgtcctttatgatttactgaatctattttacatccctctaactttaattggtcaatcactttttttactgcagtgcgcgatatattaagtgattccgcaatgctttgtccagatatataattcggtttatttttatagagtaattgaagtacatcttgactatattttgacatgattatccacccatttcaaaatttcagtttcttcgttgcttactttacctgttacaatcgctatctcaatttgtcttagcacatcttttaaccacggaccacttttggcatttaaatgtgccataagtacaccgccattaaccatcatgtcttttctataatacataggtaaatgatgtaatgtttcataaatcgtttgaaggttaacgattaatggttcatgtccttgaatatcatttgcctttaacacgtctgctgcaaccattacatttttaatgagattcgtatcataatcataaacaaacatttttaattgttcttttgtaataataattggtaatgcattcataatttgaatatattgattgatatcttttacttgtcggttacttagctttaaaggctttaatgagtaatttatatcaaatttaactgacactatagcaatcaacaattctaaatcaattggttcagtcacattaatttgattcatatcaagatgttcgaaatatggcatataattaaatgctttcagcgattttaaatgattaaaactctcttcaacattaattcctcgcattaatttagttagttcaatcactatacgctcaattgataaaaatttaatatctgccatttgtgttcgcatcgcttcaaatgtttccgttgcaatatcaaatgataattgtgactgaaaccttaaacatcgaatcatacgtaaagcatcttcttggaatcgttcctcagctatacctacagttcttattattcgattattaatatcttgttgaccatcaaaataatcatacaatttgtatgctgtatccattgctatcgcattcatcgtgaaatctcttcgttgcaaatcttcgtataaatcacgaacaaatgtaacaccacttggtctacggtgatcgacataatcttcttcagcccggaatgttgtcacctcataattttcatcattaaaaactacatttatggtgccatgttctttacctacaggtatcgtatgactaaagatagattctatttcatctggcgttgcacttgttgtgatatctatatcatgaatatttcttcccatgacataatctcttacagagccacctacataatatgcttcaaaaccattgtcttgaatttgttctaatataggccttgcctgttcaaataatgatttatccatattattactcgcctttacttttgttatgctcatttagcattttttgataataatactcatattgatctgtaatgagttctgatccaaaacgttcagcaatatctgctagcatgtttttctgaagtttgttgtataacaccttatcttcaagtaatcggatagcatagtcactcgctgaatcactatcacccacatctacgacaaatccagtttcaccatgtttaataacctctttaattccaccggcatttgaaccaattggaacgacgcctgttttcatagcctcaagtaaagttagtccaaagctttctttttcacttaataataatactaagtcagataattggtaaaattcacttacgcaatcttgtttccctaaaaataaaacatcctcttctacgtttaactctttcgtcttttgacgcattggcactaattcaggaccatcaccaagtaaaattaatttactaggtatcttttcacgtacttttgcaaatgtttctataatagtatctatgcgttttacttgtctaaaattcgatacatgtattaacactttttcatctggtgctataccaaattgtgattttaatgctgtgttatgtttagttggaaactcattttcacgtacaaaattataaatcggtataatttctttgttagtttcgataatttcatgtgtttcttgcgctaaagatttactcacacttgtcacaatatcacttttttcaatgccaaatttaattgcaccttggagtgaatgatcatagcccaaaacagtaatatcagtaccgtgtaacgttgtcataatttttatatctttacctgacatctcacgagctaaaatcccacaaattgcatgaggtacagcatagtgcatatgcaacaaatcaagatcatattctttaataacttcagcgattttagtacttaacgtaatatcatacggtggatactgaaaaactgcatattgattcacttcaacttgatgaaaaatcatattcggtaatggttttcttattctaaacgggatatttgaagtgataaaatgtacttcgtgacctcgctctgctaatttaattcctaattctgtggcaataattccagaaccacccatggacgggtaacatgttatacctatcttcattcgcttgcccatcctttctttctatttctctttctattattctcgatgcgtagataattgtttaaatttaattttacaatttaagtttatagtaatgttgagtttataatttcaaatatctaaaaagcaggtgttgtatatataatcatttatctagttatacttactttaaaaataatatgatttcatgcgatgcaattcattgatggatatttttaatcttaatcaaatccaaataaagcaaatatttttatattcactttctttcgaatcgatttttatctcttgtattaaactttttcattgtttcattaaagctctctgtcatatctattcccattgaattcgctaaacataacaacacaaataaattatcacctaattctgctttaatcgtatttgcttcctctgaatctttcttctttttttcaccataggtatgatttatttcacgtgcaagttcgcccacttcttcagtcaatctagctaagttagctagtggtgaaaaatatcctgttttaaattgtccaatatattcatcaacttcacgttgcatttctaccattgatttcatttctacgttctccttatattgcatttctaatatagtatatatcaatttgaagtctcatgcatgtttagtgcaatctactgactctagctaaactagatgacaagttgtttattttagaagtttaataattcagtttatataaatgtaatgcattcctaactaaattaaatcaattgaaattgggattataactttatgatacgtaccactacaataaaataatatagtgaataatctactattagaaaaataagcacaaaaaaactagcaaccacacaaaaatgtgattagctagttaataagtgtctaatttaagttaattgttaatctataagattaatcacttgaacgcgcaatcaaaataatacgtacaagctctgctacagcgacagcagttgctgcaacataagtcattgctgctgcagataatactttacgcgcatgtttgtattccttttcatttacaatgttcaatgccgtaatttgtttcatcgctcttgaactcgcatcaaactcaactggtaacgtaacaattgagaataataccgctaatgacattaaaccagcaccaatccataaagcagttgaaccaaatgcactacctatcgctgttaagataatacctaacatgatgatcatataacttaatgaactccctaggtttgcaacaggtactaatgctgctctgaatcttaagaaccaatatccttggtgatcttgaatggcatgaccaacttcgtgggctgcaattgcagttccagcaactgatggtctgtcatagtttgcaggagatagtgaaacaactttctttttaggatcgtaatgatctgttaagaatccttcacctttaacaacttcgacatcataaataccgtttgcatgtaaaatttctaatgcaacttcacgacccgttttaccactagttgatctaacttgtgaatatttctcatagttagatttaactttgtgttgtgcccataaaggaagcaccattaatattacgaaataaattatcatagtaaaaattgaagacaataaactcactctcctttatagatattttactgtcatttgccgtttttatcaaatcatttacactttaataatttgtttaattcaatataaagcaaaagtccaaaaacactcagacaacatgataatacaccaatttgccacacatgtgtagttataaaatcataatatggaaattgaaggtgaaaatagtcaatataatcattcaaaaatacccaagtcatcgctacgctgattccaatcatagaacgtttaaacctaggatagaagtaaattgcctgaacagccattatactgtgagaaaacattaataccaggccatttactgtaatatcaccttgttcaataataaataatatattcataataactgcccaaatcccgtatttgaataatgttacaaatgccagtgcatcgataatactattttgttttcggattaatatcaatgagattgaaataactaagaataatattgcagttgggctatctggaacaaaaatcttaaactgccacggcgtatgacttaattgttcaccataccatatataaccataaatcatccctaatatattacaaatgaggagcatcattaaccaagaacgttgataaagtgtatattgccaaaatgtattaatcgtcatctgctaagtcctcaaattgattatgtttatttactagcttgagtgtatttaaaatttgcgttagttgataaaaacgttgcttttcattcatctgtaaacttaaatcaatattgtgtaacaagtaatctattaataacgcatgtttatgtcgatctatagccatactatttaagtcatgaaggtaagtttgataactgggcgattccgttagttgagcaactattaaatcatctagcctttgctcacgctttgacacgtttgcgaagtgaatttgaatatcaaaagcacagttatgattagcgatataatcaaatatttcatttgtattcattaactttatattacgcttagtaaattgaattgcagaagcgtgacttcccacttctgcaatttctaatgtttcatgatgattaatttttgtatctacaaaatgaatgtttgccaatttcgcctcattcacttttatatagttaagcacccaaactgcaatacgcgacttaaatcgatattgaaaaagtaaatattcaataaaactttctttaatttgattgagtgtctctgacatcaaataccccattttaagattgcaatcttgataattcgtcatgccaattttcgttacttggctctagttccaacaattgatttaaaatagtaattgcttgttccttttgaccaatttcaattaaatagaaataataatcactcataaaatcaatatttgttttcatcgttggatatgctaattcaaagaaatgttgagcttctttatctcgctcttcttgaccataggcgaacgctaaatgccacatgaatgtaggatccaaatcttcttcatctacatatgttaataattcaatgattgcttcataatcttcttcattacgatataaatcgcttaaaatcaataaaggttcttggtaagcattatcaacctctaatgcttgttttaacaataatacaccttcattagcatcgccgtgttctatttccaaacatccagttgtatacattaactctttataaaattgacttagtcgtaatccttctttacccgtttcaatggcatctggataatttttttcattttcatataatgattgtaaatacaggtatccttgaatataatcaggatctttagaaagtaatgtagtcattattttaattgcttcttgagtgatgtcatttttatcataagaaatagcttttttgagataatcttctgaagtcatctcatcttcattaatttcatcgtataagcgaatcgcatcactatagttaccactttgtaaactacaatctgccatacgagagaataaatttacaccattaacttgatattcaccagtttctaaaacagtttcgtattcagaggtagcacgtaaatattgaccatcataatataacatttcagccaatgcaaaatggattattggatcatttggctctagttcaagtgcttcttgtaatttatcaatagcaacttccatcatattaatttgttgatataaatctgcttctaacatcaacttttcaggtgatggttcaacataacttaaatattctaacgcttcgtcagtttgattttcagacattaaaccttcaataaaataaatcagcaattcactttcgtctggatatttgtgatataacacgcggaatacttccaaaccttgtggcattaatccaaaattataaagtgtctctcctagaataaataatgcgtcatcgttgtcagtagttattgcttcattaacacgagagtctaaattttctagtttttgtagattgatatcgtctattaatttatagatatcttccattttatattatccctcattttctaaaagctttagttttggtaaaaatcctggaaatgatacatttacagcatcaaattgtttaattttgacaggttcgcttgaaagtagagaagcaactgcaagcatcattcctattcgatgatcagttaaactatcaactgttgcatttgttttaaattctgacggatgaataatcaatccatcattagttggttgtaattcaaaccctaacaagtttaacatatcagccgttgtatcaattctatttgtttcttttacttttaattcctcggcatctttaattgtgctcgtgccaactgcttgtgtacaaagtaatgctattacaggcagttcatcaattgcttttggcactaattctccttcgattgttattggttgaagcattggtgtgtattgaatacgaatagaagcagtaggttcagcaccagttgtttgattgaaaagttgaatattaccgcccattttttcaacaatatcaataatacctgaacgtgttggattgattccaacattatgaattgttacatcacttcctggtgtgataagtgctgcaacaataaagaacgctgcagatgaaatatcgccaggaacatgaaaatctgcaggtttaatgtatcgaattgcttcaggagttgtagtaattgataacccttccgcttcaattggaatattaaaatgtctgaacatcgtctcagtatgatttcgacttacatctaattctttaatgatggtcgcttccttagaaaatagacttgcgaataagatggcacttttaacttgtgcacttgccacttccatcttgtaattaatacctttaattacagatggtttaatgattaatggggtgtaattgtcttcaattccttcaatatttgcattcatactttttaacggtcttaaaacacgatccatcggccttttacctatggaaacatctccagacaagacactttcaatacctaaaccacttaacaaacctgccaataatcgtgttgtcgtaccagaattacctgtatacaatacttgatgtggcgtgttaaaagactgatatcctggggaagtcacaactaatttttcatcatcttctttgatttctacacctaacagtcggaaaatgtccatcgtacgacgacaatcttcaccaagtagtggcttatatatagtagatacaccttcagctagcgacgccaacatgattgcacggtgtgtcattgatttatcgcccggcacttcaatttcgccctttaacggacctgaaatatcaatgatttgttcatttaccatttcattcacctacttaaaatatgtttttaattgttcacatgcatgttgtaatgttagttgatcaacatgttgtacaacgatatctccaaattgtctaatcaagaccatttgtacaccttgcttatcattctttttatcacttagcatatattggtataacgtttcaaaatccaagtcagttatcgtgtctaaaggataaccaagttgtattaaatattgaatatagtgattaatatcatgcttagaatcaaacaaagcattcgcaactataaattgatagataatgccaaccatcactgcatgaccatgaggtattttatgatagtattcaacagcatgcccaaatgtatgacctaaatttaaaaatttacgtacaccttgttctttttcatctgcaacaacaatatccagcttcgtttcaatacctttagcaatatatttatccataccatttaatgactgtaatatctctctatctttaaagtgctgttcgatatcttgcgtcgctgattcaccattcaataacgcatgcttataaacttctgcatagccacttaatatttgctcaaatggtaacgtctttaaaaagtctaaatcataaatcacagcagttggacgataaaatgcaccgataaggtttttaccttgctttgagttaatacccactttaccgccaacactagaatcatgcgccaaaatcgttgtgggaacttgtataaaatggacacctcttaatagtgttgctgctacaaatcctgcaaaatctcctgtcgcaccaccaccaacagctataatcgctgtattacgtgttacatgatgcgacaaaatgtattctaatgtttcttgatattgctcaaatgttttcgtcttttcaccagctggaataatgactttatgtacattttcatatgataaaatatcatcaaatttattcgcaaaatattgatttacatattcatcaattaacaagaaactttggtcaaattgatttaaatatgtgcctatatacttgattgcaccgtgttcaacatatattggataattgtttgaagggtatgttgtttgtaatttcatgattacacctcaattgttcttgttgttaaaactcaatatttaattgtctgcgctcaataatttgttgtttaagttgctcaatatgatttgattggaattcttccaataatgcttttgcaacttcaaatgctacgacatgttcgcagacgatacttgctgcaggaacagcacaactatcagaacgttcaattgttgctttaaagtcttctttagtattaatatctactgaatttagtggtttatataacgttggaattggtttcattacaccattaacgataattggcattccatttgacataccgccttctaaaccacctaagtgatttgacccacgataatagcccaattcagtattgtagagaatttcgtcttgaatttcactaccaggcttttcagctgctttaaatccttctccaaaacttacacctttaaatgcattaatactaacgacaccctgtgctattcttccatctaatttacgatcataatgtacataactacctacaccaacaggcatattttcaactacaacttgaactacgccccctattgaatcaccatcgtttttcgcttcatcaattttatcgcgcattgcttgtgcgatgccatcatcaattacacggacgtcatttcgatcaaggtttgctttaaatgtttctgaatcataaaaatctttatctttaatgccacctatctcaacaacacgactgtatatttcgatatctaattgttctaataaaactttgcatagtgcaccgaccgctacacgtgctgctgtttctctggcagatgaacgttctaatacatttcgtaagtcacgatgattatatttcataccgccaactaaatctgcatgtcccggtcttggtttcgtaattgtacgtttcatattttctcgttcttcgtcgcttattggcgcagcgcccataatttttcgccaatgtgtaaaatcatcattagtaacaaccattgtaatagggctacctaatgtataaccatttcttacacccgaaacaatctccactgtatctttttcgatttgcatacgacgtccacgtccgtaaccgccttgacgcttaaacatttctttattaatatcctcaaccttaatttctaaatttgcaggtacaccttcaacaataactgttaattgaggtccatgtgattctcctgaagttaggtatctcatacacactcgctcctttcatacttccacgataacattataatatgttgttaatcttatcatattcattgtgcattcataaatgtttgttttcaagctcaattaagaaattgatttatatctctttttaaatgtcagaattatcttaatattaaacgaactaagattcattataatatattcacaacgagaaaagtattatgaatttctaatattgttatattgtttaaacaaccatttgaaaatttaaaatttattcgaacaacttataccgcatataatcgtagctaaccacgaataaataatatacaagctatatttctttatataaaagaaaatggactgatcattttttataaagttaatcagtccgtataaaaatagtttatgatattaaaaatatgcatatgttaagcgtttttgttatacttcgacttcaaaaatataatcaactcttttactaatacataaaaaatataaatgagagtcagtataaaaataatttttgttaaaggattaagtggtttgtctaaaaatatagcaccatataataattccattaattttaagaacattaaaatccccaaaataattgaaataatattcttcattttaacaaccccttctttctgtttagtttcatttgataaagaatattcctctctttttaataagtgttaccaaaaaaactataaaatttttcaagtaatttactacaacataaaaaacgggtcttgttatgtataatcataatgactaaccacataacaaaaccctttctacctttataaataaatcataaaggtttatagcttatattttattcgtataaccaagcatcacgtggtgaagcatagctagtaatttcattttcattaaaccataaattaatttcacgttcagcagactttaatgaatctgaaccgtgaatgatatttctaccaacagttaaacctaaatcacctctaattgatcctggtgaagcttctgaaggattggtgctgccaataatatgtctagatacattaactgcatcttcaccttcaactaccattgcgaatactggtgctgatgtaataaatgaaattaaatcattataaaatggtttaccttggtgttcaccataatgtgtttcagcaagttccattggtacttgcattaatttaccaccgacaagttttagtccttttctttcaattcttgaaattacttcaccaattagatttctttgtactgcgtctggtttaatcattaaaaatgtacgttccactttatgtatccccctgtgtttaataggtttatgtatattactattatatattaacaggttggtaaagcgctttcaatacttttcataaatactatgtgtttcttgaacccatttttttcgtcaaacttaaaagtagtgatttcggatgtccatctggtaactcagaaatcaaatccaaagctttacttaaatacttagaacttactgccttagcctcatcgatgctgtcagattttctaatgatttggatacattcttcaaattctttgcgttcactatcacgacgtaactgttcgattttcaatttgaagtctggatttttacgcatttctaataaaatcggtaacgtaatatgaccattaagcaaatcacttccgaccggcttacctaatttcttttcggtacttgtgaagtctaatacatcatcaatgatttggaagctcatacctatataatgaccaatcattttcaattttcgtacagtctctttatcagattgtgatgtaattgcaccaacttcagttgataattgaattaacagtgctgttttgcgattgatacgtcgtaaataattgataattgtctgttgactgttaaattggtcttgaaattggaaaagttcccctctacaaacatcaacgatagattcagatattaattgatgtacacgattatctttaactgccattaagtgttcaagtcctaatgccaataaaaaattcccagttaaaatagcagttgtctgatcccatttctttgatatggttaacttgcctcgacgcttgtcgcttttatcaataacgtcatcatgaacaagtgttgccatatgaattaactctaatgcgactgcaacttgatacgtttgttcagacgtttggtcatctttgccaaattggctactcagaattacaaatgctgggcgtactcttttaccaccagatgacaataaatgtaatgatgcctgttctaatacagaatctttactttttattgccttttcaagtcgttgttccactttcttaatttcattgttcatgtttaactttgccacgttaatcacctttggtattatctttttctttatagccaaggtgcattgcagcaacgccccctgtaaaactacgtactcttacatttatgaaatccgcttcttcaaacatgcgcttcaactcttcttttccaggaaaattaaacgtagattgctgtaaccattcatattcttcttttgattttgcaaataattttccaaaaataggcataacaaatttaaagtataatgcatacatttgtttaaagactggcaaagttggttggctcgtttcaagacataccaccataccacctggtttaagtactctattcatttcttttaacgcgactaaatagtctggcacatttcttaatccaaacccaattgttacataatcaaaagaattgtcttcaaacggcaattccattgcatcaccatgaacaagtttaacattttccattgaagcagttttttcttttcctacttctaacatattctcactaaaatcaataccagtaacttcacctgttggtcctacagctttgcttaatgcgattgtccaatcaccagtaccacaacaaacatctaatgctttcgtaccttttctaacacccatgtctttcatgacacgttttctccatactttatgctgctcaaaactaataatattatttaatctgtcatatttttttgaaatattttgaaaaacgcgatgtacttgctctttatttgctttattgtcagccatgcttaattacctctactttttaaataacttttttggatatcgtgtaagtaatgctttacttcactttgattatatttcttgaagtatgatggatagtaatcagacatatcttcaaataaataattatatatttccgactcatcaatattgataccgaaatgagataacgtaatatatgggaaaagtgtttcaatttttactattgcttgagaaatttcataatcatttaaagcttgatgatgtaatgaagatttcaattcattaatttcaacaattgctttactaatttcattttgaaatgataaatcattgatttctgctagtagcgtataaaaatgtgcactaattaaatctccaatcaaaatggaatgcttagacaaatgattatatgtaatgtcatcaaggtgtctcattgatgtgtcaattgtgaggcatgctactttggcaacatctggaatatcatataaatcgagtaacttacctaaccgatgattaatattaatggattcatattctgatacgccctttaatctttctaatatttgtctttccaatttgctaacagttgtttccatgtctacacctcacgatattatcactattcatattaacattatatgtaagaaattaaaatcttttgaagcattaagattacttatcatttttaaatttcaatttaaactaacagtaatttatgtagcttttgtaattctcataataacccttacttcatttacattattcatcactttaaataacataaaatactatagtagacatggttaccttttaagtaaattcaacactaccaattaatctaattattcatatgtatattttgtagttgctatttttatcaaaactattatgtcatgaaatattttgaacgcttaaacaatggatgttccaaagattaaaaacttagaagaacattacaatttatgtacagtttgtaagtattaaaagcaaaataaaaagcccttattcagggctttttaagtaaaattattttacagcatcttttaatgctttaccagctttgaatgctggaactttacttgctgggatatcaatttctttaccagtttgagggttacgacctttacgtgcagcacgttcacgtacctcaaagttaccgaaaccaattaattgtactttttcacctttagcaagtgagttttggattgattcgaatacagcatctactgctgaaccagcttcttttttagttaaatcagcttgctctgcaactgcattgattaaatctgttttgttcattagacattcacctcctgaggtttgataatgatatgtttatatcattatggtaaaactttaacacaagcattacataaatcgcaatcatttatgtggcaaaaacgttgaatttaagccatttctattcattttacgtaattattagctgtatatgtgtaataatacacattttattcagattttttatcgcgctccattaaatcttttacgcattcttttactgatatattttcaaataacactctatataatgcatttgtaattggcatatccacatttttttctttagctaaatgataaacggatttagttgtataaataccttcaacaaccatattcatttcagataatgcttgatccattgattcaccttgtccaagtttatatcctaatgtgaaatttcgagaatgtgttgatgtgcaagtaacgattaagtcaccgataccacctaaacctagaaatgtcataggatcggcacctaacttttcacctaatctgctaatttccgctaagccacgagtcattaatgcagcttttgcattatcaccgtagccaattccagctacgataccacttgcaactgcgatgatatttttcaatgcaccaccaagttcaacaccaatcaagtcatcattcgtgtacacacgtaaataatcattcataaataaatcttgtgttaatttacttacacttttatcttttgatgatgccgcaactgtagttggttgcttgactaccacttcttccgcatgacttggccctgacaacacgccaatacctgcattatattcaggtgaaatagaatcttcaatcatttctgacacacgtttaaacgtcccattttcaatacctttagcaacatgtataaaagtctttttagatgtcagcttatcattaatttgagtagcaacttctcgcattgctttagtaggtaaagccattaaataaatgtcagcaaattgaattgctttggtcatatctgaagtagcgataatgctatcatctaatttcgcgtattttaaatactttttatttgtatgacatgtatttaattcatcaacagcatcttgatttttaccccacatcaaaacatcatgtccattttctgcaagaacattggcaagggctgttccaaaacttcccataccaaaaacggtaattttagtcattgttatcccccaatcgttaatttctctttcgagctataatatgaattggtgtaccttcaaaaccaaaagcggcacggatttgattctctaaatagcgtttataagaaaaatgcattaattctacatcattaacaaatacaacaaatgtcggtggctctatagcaacttgtgttgcataaaagacattcaaacgtctacctttgtctgttggtgtagggttcatggaaattgcatcagtaacaacttcatttaaagttgaactttgtacacgttttttatggttttcacttgcttcattaatgtaagggaataatgtacgtaatcttgtgcgttctttagcagacacaaaagcaatttgtgcataatctaaaaattggaattctttacgtacttcatcctcaaatttcttcatcgttttactatctttttccacagtatcccatttatttacgacaatcacgactgctttaccttgttcatgtgcatatcctgcaacacgtttatcttgttcaataatgccttgttctgcatcaatgaccactaaaacaacatttgaacgttcaatcgcttttaaggctcttaacactgaatatttttcagttgattcatatactttacctttttttcgcataccagcagtatcaatcaaaacataatcttgtccatcataactatattcagtatcgattgcatctcttgttgttcctgcaacattagagacaatgacacgatcttcacctaaaatagcatttactaaacttgatttacctacattcggacgtccaattattgaaagacgaatcgtatcttcatcatatgggtcttcttcctcttcaccaaaatgagaaacaactgcatctaacaagtcaccaagccctaaaccatgtgaccctgatatcggatacggttcaccaaatcctaatgaatagaaatcatacacgtctgtacgcatttccatattatctactttgttaaccgctaatacgaccggttttttagatttgtataaaatttgagcgaccatttcatcgctttgtgtcaatccttcacgcacgttaaccataaaaataataacatccgcttcatctatggcgatttctgcctgcgctctaatttgtgtttggaatggtgcatcaccaatttcaataccacctgtatcaataatattgaaatcatgtgttaaccactcacctgaagaataaatacgatctcgtgttacacctggcgtatcttcaacaatcgaaacacgttctccaactattctattaaaaattgtagatttacctacgttaggcctacctacaatagctactataggtttagtcataagctaacttcctctctttcttatatctttttaataatatcacatgagactgtgtattcaaaatgagtttattactgtaatgataaaaatcagcacttaaaactttatcttataaaacacttagttaaatttgtccacgttatcattccgaatatattttgttacaaaaaaatactccacatgcaatcataaacatgtggagttgactattaaatattaaattatagtttaagatttttaagtttatcaccaatcatatcgccaattgttggattatcttcttcttcgctttctaagtacgccttagtcgtagaaggatcgctttcaacaacatcttcgtttggtaatgttgctttaatagatagtgatactctttcattctcttcatcaatacctaatattttaacatttacttgttgaccaggttctaacacttcacctggcgtaccaatgtgtttgtgtgcaatttcagaaatatgtacaagtccttgtacacctgatgcaatttcaacaaatgcaccaaagtttgccaatcttactacgacaccttcaatgacatcattttcgtggaattgacctttaatattttcgaaaggtgttggtaacgtatctttgattgataatgaaatacgttctgtatctctatcaatagatttaattttaactttaacatcttgaccaattgaaactacttcttctggtgtttgaacatgttcgtgagaaagttcagatacatgcactaaaccatcaacaccgccaatgtctataaatgcaccaaattgagttaaacgcgctactttaccatcaataacatcgccttcatttaaagattgtaataattgatcttttttagcatcgttttcttcttgttcaactgctttacggcttaaaatgactctattattttcaggatccaattcttcaactttaatacgaattgtttgtccatcaaacacagagaaatcctcaatgaagtctgttgaaattagtgaagccggaacaaaacctctttgtcctacatcaacaaccaaaccacctttaactacttctgttacttttgcttcgatgatttcattattatctaatttttcttgtaaataactataagacttctcagtttcaagttgtcttctagataagatgtaagctccagtttcattttcttcatcaaactcaactttagtgacatatgcttcaacttcgtcgccctcttttacaacttcacttgggctatcaatatgatgcgtagatagttgactaataggaataatcccattaaatttaccaccgttgatatgaacaacaacttgcttgtcttcaacttgttgtacctcgccagtgactttgtcaccttctttaatatcgttaatcattgattcattgaattcttcagtcatcttgtttgcctccttatacactacatatttataacatcttataaactgacagaattgtcaagaaattctacctttattacatttagtaaattagttgtatccataaatatgtcacttaatctcattctgtgaattagttggacatatatttattacaaccatatattcaaacaagtaataaagtccgctatgtttatacatattttttgtataaaaattagcatagctcactattttgttttataagtctgtcatttcattgttctctacaagatatattatagtaaaattttatacttttataaaacaaaaagccacgcaaataagcaacttttacatttgaatagtaagaagaccgtatatagtgcatctttctcgaattattacataggtcattttttgtgactaaaacagcttcttttgcaatacttagatttgtaacactcattttcttaccatttgtaaaatgctttatgaatgtaatgaattatttttggaattctaataatttacctttattatttctgtttactttttaaaaaacttacacaattgactgacgcattaactttcaccaaaagtaaaaaggcaacttttattcatcgttgaataaaaatcaccttttaatttgagtaaatcattatcagcacattcaatttgcatatgcgttaagcgttgcacattacaaatagatagttatgacttactagattatttaatttgactaaccatcgctaaaatttcgtcagtaacttcttcaatcgtcttgcctgtcgtatctaaagtcactgcatcatctgcttttcttaatggtgatatttcacggttcatgtcatattgatcacgtgcttctatatcacgttttaaatcttcaaaatttgattcgatacctcttaattgattatctttatatcttctttctgctcgctcttcaactgatgcaatcatatatacttttaaatctgcatctggtagcactacagttccgatatcgcgaccatccattacgatacctttttctgcagctaactctttttgttttttaacggcgaatgaacgtactggctctttagatgcaacgtatgaaacatgttgcgtcacatcattgtttctcaaaaagtctgttacatcttcgttatctaaaatgacacattgacctttatctgctttataagttaaatctaatgttgtttggtcaactagttttgcaaagtcctcagttttgtttaattttaaatatttgtatgttaatgcacgatacattgctcctgtatctacataaatcattgatagttcactggctacacgtttcgcaattgtactttttccggcagcagctggaccatctaatgcaatattaatggctttcatgcgtcatttcccttccttgtcgttttatgaataatattttatcataattaagtaaatgaaatataggaggaaatatatgaaacatctacttgttattcatactggtggcaccattagtatgtcacaagaccaatctaataaagtagtaacaaatgatatcaaccctatttcaatgcatcaagatgtcataaatcaatatgcacaaatagatgaattaaatccttttaatgtaccttcacctcatatgacaatccaacatgttaaacaattaaaggatattattttagaagcagtatcaaataaatattatgatggtttcgttatcacgcatggtaccgatacgttagaagaaactgcctttttacttgatttaatattaggtatcgagcaacctgttgttattactggcgcaatgcgctcgtctaatgaaattggttctgacggattatataattatatttccgctattcgcgttgcctctgatgaaaaggcccgtcataaaggcgtgatggttgtatttaatgatgaaattcatacggcgcgtaatgttaccaaaacacatacgtctaatacaaacacatttcaaagtccaaatcatggtccgctaggtgtattgacaaaggatcgtgtgcaattccatcatatgccatatcgccaacaagcattggaaaatgtcaatgacaaactaaatgtaccattagtaaaagcatatatgggtatgccaggtgacatttttagtttttatagtcgtgaaggtatcgatggtatggttattgaagcgttaggacaaggtaacatacctccaagcgcattagatggcattcaacaattagtatctttaaatatacctattgtgctagtttcacgttcctttaatggcattgtgagtccaacttacgcatacgatggtggtggttaccaactcgcacaacaaggttttattttttctaacggtttgaatggtccaaaagcaagattaaaattattagtcgcgttaagcaacaatttagataaagctgaaatcaaatcatattttgaattataatgattacgtaacataaaaaggtctatgtacaataattagtcatcaacctcatttgacatctcatgaatgtcagtcgttgtaaaactaagttatttagtacatagacctttatttttatgattctaacggcgtttgtttcttagctagcatgctttgagcaataatgccaccgtggaatttaccattttcaataaaaatggtattcgcatcgttccctgcagcaatcacacctgcaatgtagcaattttcgatatttgtttcgtatgtttctttattatacataggcgctgttccaaattcatttgtattaatttgaatgcctacagattttaaaaattcataatcgggatgataaccaatcatcgcaaatacataatcattgtgtattgttttactttcaccatttacttcataagtcacagtatcttcagttatttgggtaacattagcattaaattccatgtcaattttttcatgatttactaatgctgtgaaatttggaagtatccacggtttaattgaaggcgaataatctccaccacgatatagaaccgtcacgttagcaccagctttttccaactccaaagcagcatcgatagccgaattcttaccaccaataataacaacatcttgatcaaaatacggatgtgcctctttaaaataatggaacactttaggtaaatccgcaccttcaacttctaatgtattatgctgaccataatagcctgtcgcgattgttaaaaatcgacattcataaacatctttcgtcgtagtaattgtaaatttattattcatttttttaacagttaatacttcttcaaatgcatttacttttaattgatgatgttttacaacttctcggtaataaactagcgcttgattacgtcttggtttactttcttcaacgataaacggtacgtccccaatacttaatttatcacttgatgagaaaaatgtttggtgagtaggataattgtagattgattcaacgacattacccttttcaataattaaggtatcaataccttttcttttttgttcaatagccgcacttaatccgcatggccctccaccaattatgatactttcaactttttgcattgtttcggcctcctttaatcccaaactattataacagttcagtgattgatgtgctaagtctgtgcttgaagatttatgatatatttttgacaatttgtttaatgtgaatatagaattgttagctacggagttgaataacactacaatttaatatgttgatttattttttattcttccttgttaaatttgttgattatggtgttttatctttttgatctatgtaaaaagttaaattgatatgtcaatatttgagacaacaccttgttaaataacaaactttgaaaatgaaaaaactgctacatacttataagcgcaatttaagttttctataatatttagagaaactttataatatgcacgtttgtatatagcagttcagttacaatttatatagttatattatggaataacgatttgttgaccgtttctaatattgttaccacttaaaccattggcacgtctaattttttcaacattttccggtgaacctgaaccgtagtattgaattgcgatacggtataagttttcttgaccattcactgtatgtctttggccaccaccttgacgttgttgttgctgttgttgattttgattagcttgttgttgattttgattattttgtgcttgattgttcgcttgattagcgttgttttgatcattatcagattcatctttagtcgctttgtcttgatcatcttttgatttatcactgtctgtagattttgatttatctttagaagcgtctttagatgtgtctttgtctttactttcatcagcattatttttatttgtattcgcgattttattttcttttgtaccattattatgattgtttaatgccatgcctccaaatatcgctaatgcaccgataattagtacagctgcaattaatggtaacaatactttggccatgccaccttttttacgttctttatctctatcatgatggtcatgttcatcatggttttgacttgcattattagaggcatgtggttttgaagcggcagaagcacttttacttgctgcgcctccagccaaacctgctgttccagcaccgattgctgcaccttttttaccattatgatgatctttagacttatcttgagacgctttatcctcagtcgagttattcgccttgccagaattacttttcttttgagcgtcatttgaatgtttcttagctttagaaacacccattgcaccagctgcacctgctacacccgctgttccagcaccaattactgcaccttttttaccactatgatgatttttagattcatctttgtcttgcttaacagttacatcatcatgtttatcttttgatgtatttgcttggttagcacctgttgcaaaatatggtttaggttgctgagattgttcagcttcactcttatcagaaactgttgaatgctcagtgttattttctgcatctttaatagtctcgtgtttatcattgtcttcgattggttctggatgtgatttatccattgcaaaagcattcttattataatattcctcttcatgttgagatgtactgtcttgatggctaggttcttgatttacagaactatgcgctgatgattcgacttgacgatcatctaatgtgccagcctcattgtgagcattgtcgtcagatgcttgtgattcatcgtgatgttgtttgttatgatttgttgctaaatcacggcgtctttttctcctttgggcatttcttggtgggaactgttgctccgtattctctgttgtatcttgatgttctaattctgattggtctttttcgacatcttccgtatggtcttgatgtgaatttgtgtctatcgattgacgatttttttcaaagtcatctttaaaattattagacatagccatcttcctttctattctattacaatgattttacataaaatatacccgtatgacacaagtttatgtatatttttcaaaattatttcaatcatttttcaattgtgtatacactaattatagcttgtcaattttcttttagtaaagtaatactatctgagaaataaattttgcaacttttcatcaaacccaatacttctaattaccttcttcttatttaaaattacgatatcagttatattagaatcattgtcacaacatcgatcttgtgccggtggatattcaccgaaaaattctaataaatacttccgtctacattgatccaatttgcaatagccaatcatgcgaaagaatcctaattgctttcgtttaaatgattgcttaaatatctgtttcaaggcgccgatactatagaatgaatgcaacgttgtcaaaacgtcttgtttatcgggtgctaaaaattctcctatttcgaatttttgtacatcttcttctgttatcatatctgcaaataataacgtttctaaaatatatttatcgtccggttgaaataaactaattgcctgacttagttcaccatcgcgacccgcacggccaatttcttgaatgtagttagaaggacttgttgaaagatgaaagtgaatgattgtgcgaatatcttttttattaattcccataccaaaagcactcgttgcgactataatcggaatatcattatttaaaaattgttgttgaactgtgtgtcgctcttgataattcatatcaccatgataaatgccagtgagaaaacctgaatcataaataagttgcgctaaattcagacacatctttttcgatgagacataaataatcgttggtcccgactgttgtagaaacggtagcaaccactcaattttatcttcatcatcatgaaaattaagatgcttaaagcttatgtttgggcgattcattgtagttttaataacgttgaattgaattgctaacatttccgtcaaatcatcttgtaaatgcggtggtgcagttgctgtcaatgctaagactaccgcttctttaaaatgctttgttacttttcctattagagcataatgtggtctgaaatcatatccccattcagataggcaatgtgcttcatctagaacaatcatgccaaagtctatcatagatattaatttaaaatttgacggttgcaggagaaattctggacttagaaagatgaagcggctatgtcgtaaacatttaatattatgctttttctcaatttcatccataccagagtgaatacatgttacacgtttttctccatttattttcaactgcataacttggtcatccattaaagatattaacggtgagataattaatgtcggcttacctgataaatacgtaggtatttgataacacaaactctttccgcttccagttggaagaatacctagagtgtgttgttgagacattatactttctataatttcctgttgtcccggtttaaaactctcgaaaccaaatttgtttcgtaaaatatcatgcaacattcaaatcacctctttcaaatccaacgattaatacttttaattgaaaatatgataacgtgtcaaattgttctttgtaaaattttaatcgttcgccacgatgctgttgataaaaattcaaaaattgcagttgatcttcttgttcaacataatcatcgtaattagacatataacctttgattaagatttcaagtacatgatcttcgatagtattgattttaacttgttgttgagccgctatatcttccatcgtgaattgttcaagcaatcttgtataagtaatataggtttgatttaataatgtaggtttcattattatttttgataaaatagtatattctccactttctaattcaaacatcattgtcactaaattattcatttcgtattcaaacaattgctgttgagatagtttttctattaaactaacttgctgtctcgtatacattggttcatcatagccttgcaaataataatgtaagtaacatggcccttttaaagttattgctttaaacaagttatgtagttcattttcaaagtcaatttgtaattggttttctttaatatagttatagacaatttttacagtttcttgtatcttattattttgagagattggtacgaaacgaaaatcttgctgcatagtattagacatggtttgcactaatagttgaattgcttgaaatgtttgccccaggctttcaaatgtatatctaggatgcaacataatttccatttcagcattaaattcagttatattttctaaaaatagctcaaaagacggatattttaatagtggtaaactgtgatataatgacaactgttgttgactacaagcgtcaaaaaaggtttggtgagatttcttaccaactaagatattgtaaatacttttatttgttttatagttaaatgtttgttgtaatgctgtttttataatgtgttgcaagtttaaccctcactctgtaaaacggataatttgaaaataaaaatgatgctgtctaaaattttagtcacattactattttagcatttttatcaaaggaggcgaagacattggcaaaatatacaatcgttgatatggatacttgtattgcatgtggtgcatgcggtgcagcagcgccagatatatatgattacgacgacgaaggtattgctttcgtaatccttgacgataaccaaggtactgcagaagtaccagaagaattatatgaagacatggaagatgcattagatggttgccctacagattctataaaaattgcagacgaatcatttgacggggacgctttaaaatatgaataattgattttttagacaaatgttccatagaaaaagcaggtaagctatcgtttattgatagtcacctgctttttattattatgtgtatattattttgctttaatttgattaaattcttttcaagaaattcgcaagccttctatatagtaatataaatacaatagaaatgacgatacctttaataatattgaatggtataattcctgaaacaatgattactttaagattatttgcgatatcagctaagttaaatatcataccgtacaaaggtaataaaacgaaatagttcaagatactcaaaacgatagtcataatgattgttgcaatgattaatccagtaatcaaagattttgttgaacgtttatttttatagatggcgtaagcagttaataagaaacttgcgcctgctaaaaagttagcaaatggtccaactggatcgcccatactaaataagtagttcaataaatttttaaccagtgcaactatgataccggcaactggtccaaacgtaaatgtagctagtagtgacggtacatcactaaaatctaaagttaagtatggtggcaaaaatggtataggaaacttgataaaagttaacacaaacgcaatcgcgctcaacatacttattgtgataagacgtttattttgttgcatattcaattttctccttccattcatctcgtaagaataggaggattattgcacaacaaaaaacctccatcttctcccatccagactatactgtcggctctagaatctcactagatcagccactaatatgatacatactagcaggtcgcaggctttatttactgccggttgggaattacacccgaccccgaagatgaattttacattattaaatttaattctcattaattttatactatatatcacaaaacctcaataactatgctttaattagatcatagttacgtaattggagagtgatacattggtgatttgcgagcattgtttgagtaggtttgattggtttgtggttttgtcagttgttgggatggttttttgattctatcactcaattgggtcaagatcgtcataaaatggaaagcaaattataagaatctagtaggtcaaaaagttttatatcagcacttccatttatattattatttaaatcgccagaagttatacttaaaaccttctacttatttgccttcacaacaatagtagaattgtctttcaatacttaatctatccaatatacactaatctccgttaaatattcatcatttattttattcttgatcaaacacaccatattctgaagtgcttttaccgttataatttggtttaactgtatttattttattgtccgaaaattttatactaagatctataccgtttggtatctctttttctttttttatttcttctgccatttttattacattttcactgttactttttttagtatagttcttttttttactaaatagagtagtagttaccgaaactttagacttatcttttaattgcttcttaacatttgacaattcttttgaaaattcactgtcacttttgtttaataatggttcaaaatagtctctatactcagttaaattatacggtatagtcgtaatataaaaatattcattttcacatccactattttgtgtcttgttaattgcctcttttgtaaatcctgtatattgatatttcttttcattatctttgaaaaatttatataaattgtcatacttttctttttgtgctcgatattcaaagccactcaacactgtacctactaaagtactcatatcatcgcctttgtcctcacttcttaatgagctattactgtcaataattgatttgtcaaatggaatactcgcattaaatacgatgtcgtggtcatcacaatgcacgaatacttctacgccgtcgccactacctacaacattggtagctttaacttttagaccgaagttatccataaaaaattgttcactacgtttagctattttatctttatgcttctttgcaaattcaatcgcatctttttctgcaggtggttggaagccttgtcctacatatttggaagcttccatttcttctggtactgattttgtttcattgttggattcgttattggtagttgaacatcctgatagtagtatcgttgctattaagattagtttagttcttttaaacatagcacatcacccatttatgtgtttgtaaaacttttatgtttgaaaaaactacttattctcaatgaaaacaagtagcttttaataaattaattagtatactgctagtttttctaattgctctttaacttgaattaagtttgaacgaattaacgaggcagattgatccattgtttgaatagcttgtccttcattttcgttcaagccattacaaacaacttcaaactgttgtgccatttgatcaagacgcgcatgagcttgtgtgtttaaaataaacatatcgtcataatgtgatggcgaatagataattcgtcgttgtatacaaacgtataaaaaccttgtcatatcaacggttttggcatttttaaacctctgtgttttccacgcatgtttgcccttatttaaataatttgcccttttttcgccccgaaaaaaaaacacaaaaaaataaccacactcctaaattaataggtggtgtggttttgttgattgtaggggtataaaaataaccgcattattaaagatacggttactctgttatctgtaaatataatagtagtttaaaaattagtcgttattgttagttctttttttatctgattcttttgtttctcctaattcgcaaacaggactccacataaaaatcaactcctttatataccataatgatactatattttctagtttatttcaatttttcagtttttaaaaatgagtttctgtttttatttatacgcttttctgttttctttttaaattttatctttttgttattccattcattgtaaaattctattaaattaacataaaatttttcatgccctattttatttgttgatgagatatcaatgtaaagactcaatattgtttttaaatagatttgatgcaacgactgataaaccgtattactatctgctatgttattggtaaaatgcatagaaaaatattctaatttattcatgcaatatatatgggtttcattatacttcttaatgagtgtatttataccttgcaatacgtcattacttttaataacaatttctttttcacctgtcgaaaaagtccactgtttatctcctatattttctttaattgttttcttgttgtcaaattctaaaattatagcccgtaaacactcttctttataattctcgttcttgaaagtacgaagcaaaatttttataaattcggtattggtgacttttttataagtgtgatattttgcaatctctttatcagtaaagactgttcttagttcgtgattatcaaaacttaaattcatcttattctctaattcattaattttatcttgcaaaccaacattttctaaaattttcttgtttatctcccctatatcaaaactccttttcgaaattaattttgaaaactcgtctgccatttcaacagccttttctttccttttataccttttgttaaatttatgaaccaccgttgcagcataatacgatatcccaccagataaaatagatgatattatcggtatgtatatatcacctttcatatttccacctcttttaacacaattaagtattatgatacacaacttgcgcaaaaagatgtagacagaacataatggcgaacaaaaacaaccacccagtaactagtatgggtggcgtagcgactataacaactctatgttatcaagatatatgtatcgagtgatggcaaggaagaagtctcctgcgggaccaacagtcagatatatggcctctgccgggctatatagttcactcctactatataaaagtaagtataacataaaaagcaccccgtaaactgttatacgggaatgctaaagtcatatatactacggggagtagtatgaaaactatgctctctatcgtaagaaaaaacacccagtgacatgcttgggtgaacaaggatagatgtaaatagttgatgcatgtgtaacacatcataacaaaaaactagcccgaaggctagctataacataaaaaaataggcaagtaccgaagtacctgccagttacgcacatttaaatcttgagagtaatgttaaaaagtgtataggaatattaacatccatccaaatagttatttaataactgtaagattccctataattaatgtagcaaaatttttattctaagtaaatactaaatcgtgctaaacttaccaaaactacttattctattacctgccttgtctacctctcctgtcgctatataacgacgttgtccactattagcaatataagtaatccatctatagccattgatgcaatatgcgccgtcatatttaattgttgcgttattaggtaatacacctgtaattcttgaattagttgaatagccgtcccttacgttattacctttaacattggcaactgtgtaataaccagtctcttttttatacggtacattgtttttatcaagtgtataacctgctggcactggtggatttttttggtttttagctgatgttttaacattaccagctaccaaaccacctataggcttaccatgaatcgcaccggctattaatttagaatacaagtcatagtttttcttaatccaatccatatcatttttattagtaataaaacctaattcagataaacgatagtttatatttatttctgctgatacattaacgtttagtaaatcattacgaggtgttacacctcttatttgtcctaagttatttttaataacatcttgtatacttttatcaatagtatctgcattgaattgacttgaaataataacatgcccaccacttgcactttctcctgctgcgtctaaatgaatctctagaacaatgtcatacccctgtgatttaacccaatataagccataatctttattatttcctacattaacaccgtaagcagtatcttgatacatatcttgtgattgacttgagccaccatataatgcaacttcgtgacctgcatgtcttaaatacttagcgatatttggtgttatatatttacggataaaatcacgttcatttgttccgtttccgactgctccaggatcgttataaccatgaccggctacaagcataatttttttaggtttaattactgcttgctttttggcagttgcttgcttaataacgcttttagctttatctccaacacttactttatctgggaaatttaatctaataaaatacattgggtcatcgtaataatgaacatgtcttgtaacggtttcgggaccccaaccaggttgcgcaacgccatttgtccaacctttaccattccaattttggccaaacgatgtgaaagtgtttagattagcgctctcaacaatttcaacatgtccagctccgccaccatactttgacgggaaaacgacaatgtccaacttttgcggtaaaaagctatcatagtttttaattatttgcccgtatttttcaatccttgctttattatcaaatggaatattataagcgtataaaccttgtaacctttcgcctgttgctatcataaaaaacatatttgcgtaatcgtaacactgaaatccataaaacaaatcaggattgaactgcttccctaatgaattatcaaaccatttttctgcttggttttttgttatcaacattggtcaacacctaccctaaatcatttgtgtcgttcatattcgtaggtgtcattacttctttaattggcgcttgccctgttgcttttctatacttgttttcagctttatatttctttagcttttgatttgcccatttaccttcttgagatgttggattatctttatatgtagtatataaagcaacaactgttaagataatcgatgaaacactttcttcatctactggtatcggacttatacctttattcgctaaaaactgattgactaatgctaagatcaatacgatgtatcttgttattacttttgcatccatttgtttgctccttttatccaaaataaaaagccagtgccgaagcactgactcttaactattacttacacttactaaaccagaaacacgaccaaaagctatatcctaaaattcccttaagcatggtaatcacctcctttaaatgccaaaaatagtttttaacaaggctataacaaatgtacttagaatcgtccctattaatcctagaatccacatcttgatgtctctaatatttttagcatttttctctttatttttttcatcttcttctttgtcacgccttagttcttcgaaatttctatctaacttgtcataaattttttcttgcgttctcagactgtcttctattctgtcgaatttttcaaacatagtcttatcattttcttctaatcgcgttaaacgccaatcttgttcgtgtcgtttggtaaatccaaacattacaccacccactttattcaaattaaaaagccataagattataacctatgactctagattttctggatacttttctcctgtaataattgcatattcctctttatctataacttccatatctacataccacgctatatcttctttactatattctttcaattgataccatgttttaatatcttcgaatgttggtgaaattaatttaagcattttcagtctctcctttaacctcttctaattttttattaagtgtcacaagttgttttgccattagtgcattttgcttattaacttgcatcgataactttgtactttgaacaacttgtttctgcatactagcaaccatttttcgtaagatgtcatcagaagcgactgtgttttgttcttcactgtcaatctgttgatgcaagtcatctttttcttctgaataatcttcgttaaaaactatttccccatttgaatatttaaaggctttaggtctaaaaacttgagagaaattttctggtaaattttcaatatcaataccttcttcaaagccaccaatgatagcgtatgaaattatctcattacgcttgttaactaatatttgcattattttctcactcctataattttgttaattgtccctctatttgcgttcgcaccagagcctctttgacttcctaagtcgaaatagacatcgtttgatatagttaaagatgtacgactagatttagttaatccaaactcataaacacctccaccatttccatcaccatctggaagatttgagggattcaatgaaatctttcctcctccaaaaggactgccaaactctgtaaagtcaccacctggaaaagtcccataaaaaattaataaaataaattggtctaaactctcatttaagtacaatgtagagcccacaccatttgctgttccatcaaaaataaccgaataccttttattaaacttgtcatctgcgtataatttagcgttactttcggccatattagcttttgattgggcactttgaacagtttcaaaaggtgtattgtaatcattaatagctaattctgaccactcagaccatgaacccgcttcttttcttttaacaaacactttatttgtaccgttcggtcgataagtcatacgcttgtaatctgaagttactactaaatattcgacagtaccgttagtactaacacctcttggataatttatagcttgcgaaacataaataaattgggttgaatcacctattctttgttctggattattaaaatcaaatccagtaatctgcattatcttaccatcatctttagtaatcttagctttttgccaatttgaagtagaaccacttgtgactaaaccaccactattcactgactgcttgaaggcttcatgtttctcatccatatatcgcttttgctcatcgaatgttcttgaatatgcttgcgctttattttccaaatcagatatacggctattagcaagttgctttaattcatcaatacttgaagattttgctatttgaatatctgatagacctttttctttagctttttcaatcagactcgcataatcctcaccattttttatagcctcgtccattgctttcgcgcgatccataatagttttttctaattcttgaaactcaacaatatagtgtagttttgtttcagagggaatcttgctaaacaaacttttttcaacgttaaatgtgatagttctctctacaactaccacgtctgaattacctaattctgcaaccgaaacttgagcttgataacttccatctcttttaattacatcattaggtaattgaaattttaaaatacctttaaatggatctaatatttctagtggagcaactaccattactcctttacctcgaatcgctattcgtgctttgatattttcttcactcagtaataacggttgattatttttaatgatattaaaaagaagaacagaagaatcactctctcctgttctaaaagttatatctagatttgaaatattttcataatgcgctgtattttctaaatttatagctacagatttctctaaattactcattaacttataattctcccttcgtgtaaagtccatggccctgaacttgttttactatcatagttcttcaataatatttcacaagatgctgtaacactattacgaactagcctatgaacaaaaccacctgtgttagaagcttctacatataagttccaaccagctacccctttacgttcagttggaaaatctgtaaaacgttttgtatcatccgtagttaaataaaacgacatacctactatgttaatatctgacatttttgtgatgaatgaaggtactctctcccatttaccactatttttaggcacataattccagtccgaaatgtctccagttcttccagaaagaaccctttcaaaagtcatcatattccttgcataactattacgcgtcaatatctgaattacatcaccgccagtttgtggtggcttaacttccaagaaccaacctgcatcacgccattctcttggtaatgggaaatcatcgatttgaactgtatgatcagtgtataaatagtaaagacctggctctgttaacatcccaagattcttaagtttatcaggcctcattggtaaaggtttaactctaccacctgtgtcactcatgataaaaggaacgcctcttgagtgaagtatttctaaaatacctctttgcccaatcatgaaaatacgatgtgttctatttccatcaccaccgacagtaacacctagcatcaaagcttttttaccactatctttgtcatagtatatttgcaaaccttctgcttccgcaaattcgccaggaaatgaatctagtgttccaccatagtcagcattaacctgatacgcttcttctcctgtttctaaatcgaaagctgttaaatagtttctattatttggattactgtctcctgtataccaatacaagtatttttcatcaaaagtcacaccctgcattggttgggtttcgtttgttagtctcatagggatactgattttatgcaaaactttatcaatatttttatcaacatcatctaaacttcttatctctatataattcattgagttttcaagttcccactgacttctaggtctctcaattctgtatagaattttattttctttttcatttatgacaggggtgatgtagggtttttctgggtgtcctgtaaatacatcttgcataccatacttgccatagctaatttccacattaggcgtatacttgaaacgaactaatgtattctcattattaccatttaagataaaactataaatccataactcatcatcaatatatctataaccgttatgtgtaccatgacccccacctacaatcaatgagctgtctataaattgaccattaggtcttagacgacttagcatatagccattatttctagcttgtgtcatgtatactatgcctgttctattatcaaaccagaaggattgcattactgcatttgtaagaggtgcaagttctgtcacaaataaaaattcttgcttatcaggttcaaaacgatactcgatatcaagaatttcttgtttggtcttatttaattctcttatagtttcctctttattaatttgagttttggtttcccaatcgtctaaatgttcttttaatgtgtcaaaggtttcgccgtttacattaactcgagcttgaacaatctcattagcactgttattacgtggtgccacaacaagtgcgttaatttgactttgtaaagatttgtttactgctgcttgcgatctaccattataataaatttgctcagcgaagtgttgaattgttttagctttctgatgcaacttaaactctgttgtcaagccaagcgcaaattgctctattctttgtaagttttgtatttccttagctctataatctcgacctgctaaagctcccaaatcctttattaaatacaaattttccataatgcaccttcctttctaataaaatagcactgtaccaagtttcccactatcgtcaactgttattttccacaatttaccgtttggggatttctgtacaatgctattttgaataattcctgcttcgcctatttttaaattatctaatttatttttatcatctaccgaaatgataccgtcttgaggcaatccatcaatatcactactgcctgcataaggtatcccatttatagctttccaatgtgtagctggaaagtactgtttatcgttttcaagtagcgctttgattttaacttcttctgttgccattatattaatacactccctatatccattgtctcgaaaggagaattcaaagtactagtgtataaatgatttatacgatttgcttgatagttatatctattatcttgtgcaataactcgtctgttaagcgcttgttgaatttgtaccatatcctttatttcattgctgaaagacacttcatctattgcgtttacaaatggatgtgacctatcaagtttaacaacctttaattcagtgttatatcccattaattcatgaacaaagaatacgctatctcttggctctattttttcataacctatataattaacatctaattcagtcttaggagtatcatttatttgcttttttgcaaattctaacagcttatcctgtgtttcgatatcttcatttgtttgcgtattagcatatcgaatcccaaactgctttgcactatctgcgacgtagtcaacaattgctttgtattgattgcgacctgagttgtcagcaattaaatttaagactgttgatttttcagttccaacatacatacaaggcttagcttttttatttgaagatatatcaattctatttttggggtcttctcctaaaaatatcatttctaaaacgtgcttgcctttatcaatattttttattaaatctattgtttcagactgaaccgacttagcaaaacaagaaatttgcttaatttgcttgccgtctaaaatcaacttatatattccaccttgagagcccttttttattgtaaatctaactgtttcattaccatacttgcaatcaaagttaatagtagctttagacccaattgttgcggtacgataagtaccttcttttataaaaccatttgaatatttaatgtcagttgttctaataggattataatttttcttttcctcagctgtatacttttttccaaaaacttttatagctgttcttaattccaatgtactgacagttgcagatacagtatcagtattatattgatatcgaatcactttctcgcttctttgataaaatgtttcaggagaataaaaacatatctccgtatcatttggataaataatacaaccaaacaaatctactgcttctttacaatattctaagccatttttattacctaattcatcaattggtatttttcttttaaaatctccaattattttataggtcatcttgactgacgttttttgatttgcaaatccatatcttaagtactcatctaaagagtattctggcgttttaccagtttcgctactgtcgtcatcaagcttatttgattccactgagtgattttgaaattcatacattatgtgatatgccgtaacttcaataaaaactttatcaccttcaacctttggcgctgtctgcttaattgtatatttttcaccatgataaattatgaagttttcacaaatcaataaatcaaaaacaaaactattatgagtagttctataaactgtaaaggtgatgtacctagcttcattcagttcataatattctttaaaagaaccataatctacatctagtaaattttcacaaatcaattcattaaaatccattactgataaatgatcatgataatccattaaatcacctacctataaataaaaggaaacttaaatgtagttttaatatcactgacgtctcctttaatcttaaattcatttttacctggcgctaatgttataatgcccctatttgtatcaattcccactctatttatatctcgatatgcatacacaccatctaaaacaaaatcagtgtttttatctatacttttgttgtacttaaaaatatcacctgttgtatagttaaccagttcaaatcctccactcgcatttaaattaattaatattttcaaatcgtgcttgaatcgtggatttatcgtatcagtagaaccgttccaaatagtaaattgatttgatgtatgagtatatttaggtgtgaaatcaagaggaattccattttcaaacatccaattagagtcgaataagaactcgctatcggtccaattaactgattcagaataccctttataaacatttaaacttacttcaatttcagttgaagaaccatcttttaaattagatgtaacattagctgtattcactgcatatttaacaccaggcatttgagaagtaataacataataaggatgtctgcgattaaacacagatctaaaccaatgctcaaataaatttaaatctataacatctataccatcatagccaaaccttaatactaatgaaaaaggcgcaaaactaattgcgcccggtaaaataccatctactccgttaatagttacactgttatcattggtgtttggactttcagcccttgcatctaaaaatataagctgattaaaatctgttattacttcttccttgtaaccatctatgatttttacaaaagattgcattaattagtcaaacctcccatataattatttgcatttgctctatgcccactttgttttgacaatattttttctaaacctctaattgcatcattagaacctaagttattatcctgagaagaaacagtttgaatcaatgcatctgttaatttatttcctttatcacttaacataacaatttgtttcaacaatttttcaactgtagaagtatcattatttacagtgatgttatttggcttgccatccataccgatgatgcgcataacctgttcagttaattgaattgctcgtttacgtctagttaaagggataaccatctcctgtttatctccttcacccacttcagcaagttgatgctttgtaatcaaaccaccattcgcatatcttcttggaccacttggagaccaaccacctcttgggttaaactgtgagcgccaatatctgttgttaaagaacgctaataactgatcgtaaccactatatatattgttgtgacctctaacagcataatgtctaaatgtttgtgggatatattgaagcaatccttttgctggattgccctgtaaaacgttgatgtctctaagcgaactagattgagttatacctgcatttcctcctgattcgtgttgaatcaagctaatgatatttcctacatcacccgaagtaacattaacacccattcgttttgctgcacgacgtatatcgcctgcccaagcagatgcagccttattaacacctgaaccacttcgaacgccactacctttaagtgacttcaaccatttttctggatctttagctgtatcattccctggatgcgacccttgcatcaattggaaatgtaagtgtgctcctctaacgaaattacctgtagcacctgatttccctatcagttgaccagctttaatacgttggccttgtcttgctaattgcttagataaatgcatataccagttccattcattagcaccagtcttaatttgtatagaattaccgccaccgtaatcagtccataccttatctgctataccacctttaacggcataaacgtttgttccagaaggcataccaaagtctataccatagtgacgaccgccattaaagttaagtccacctgtgtagcgtccaaatctttgccagattggatattcaaatagatagcttccatcgcctccaccaccaaaatcttcaaaccacgattttactttgtctactaatttctttttgagcaatgagtacgcgcctttagcaatttttactgtagcgttagctccgcctccaaaattaatatttaaacctgacattactttatttactagtttccctggatgttgtacataatcccacacatcgccgattttatcgcctaaccaagatgcaccatctttgattttatcgcctgccgcttcaaccatttcttctgcaccttttttgatattatgcgctgtgtttttagctgtagctccaaattctcctgcttttttacctatattacctttaagttggtctagccaatctttctttttcgtaccaccatggaattttggcaaaacacccatccgctgtaacttcagagtgtcattggcatttattacactatctccaactcctagtggaacaaccacatctcgtccttggggtgcatggaatgttccgtcagccctgtgaattacttcttgaactccaccacctggggcgtttccagaacctctatcatttaatacagcaaatgtcggttgcgttaatgctcccgaattatcggtagctacaccctttcctgctaaagtaccagtagacaatgtaggtattggcttgatgagatttttatcagtaatggctttagatattttattaataccgccaatcatgctatttaaaccgccaatagctttattagcaacatttttacctaaatcagccgcagctcttcccatgtctttaccaatatctctaatccattcatatgttcttgatagccattttctaaaaccattaaatactgatttagcgttagaccatgccgaacttgaaattgcatcaaaacgatcgtgggctcttgaatacatatccccagtccaatcttttaaagatttgtatgagttactaaaccatttcgatgttcctttccaaacggattttgcattcgaccaagctgtactagaaatattatcccatttcgcgcgagatttattagccatatccgttagccagccctttgcacttttatatgcattgctaaaccattttgatgtgcctctccaaatagattttgaatgcgcccaagctttatctgaagcatctgaatacttttgcttagtttgattgtaaatacttcctgttgtcgatttaacagattgccaagcttttccaaaccatttaccagtactattagctatagccttagtgtggtatcctacagaacttttggctgagctccaacctgaacttaatttgcttggaatccctttgattccgctccacatttttttcatttcgccgccaaaatgattagcatttctgcccattttactaaaggcttcgccagttttactttttacgccgtcccaagcatttccaaaccatttctttatattttctctgtttctacgagctgtttcttcttgttctttagcgtatttatcgctttttttcttttggtcttctctaaagttagaccaccaacttttaaggccattccaccacttttcagtatttttatatacacgtccactggataaatccatttctttatcaatatctttattttgctttttaacaacatctactacagcatcttttttagattttgcttttcttacttcatctttatgtctttgatcagcaatagctaacaatttatctttttcagacttagaaaggttgacgttattttttatagcaatgacatcatcttcatattgcttgtccacttctttttttcttgcttttcttgctttttctgcttctttaattgctttgctcgcttcgtctattgaataagcatttctgtttctttgcattcttactaaaatacgctcttgctctttttcagtcttactcaattctttaacagtgatatcacgtctttgattttcaagcttttcaatttcttttctttcattttctgaaatctgaccatcactcaaagctttttctttcaattctttgattttctgattgagttcttgctcttttttaattcgcaagtcatttttttctttagttcgagttaaaatgttttgcttttcttgttcatcgaatgcactatacttatcaataagttcttgagttttttcgagttcctttttatttcttttttctatttcagctataaggttattagataaatccgtttcaattttcaaaagtttttttgctttgtcttctgatatctgacccgagtttaaacgtactttttccatgattctgctattttcttcagaataatgcacatatttttctaaagctttttctgtttcttttgaaacacctttccctaacacttttacagtatcagacgcttttttagaagctgtgcccatggtttgcataaatcctttaaacttgttgactcctactttgagaaggtcatcgtcgcttaatgatttataaccatctttcatatcttttgaaaacttttctttgaagcttttgccgatacttccaagatagtttttaaactctcctagctttctaacagcgccgccaataattttaccaccaaaaaactttatagtttctcctaaaccgttaataccgtttctgaaccattccacacgatcatatgcggttttaaaaactttatacgcaattgtaatagcagttattgtagcacctataggtcctgttaaaaaccttaaggctacacccgcaaatcttgcgcctccacttactgcaaataaagattttgcagctaatcctaaaccgtttttcaaaagtttgaacggtaaaattgctagctttgcagaatttttcaaaacatttataggttttaaattaaacatcatagctccggctaaccctttaaagccttttgacgtttttcctgttgtagaaccaagaaataatgtttgaagacctaaagatttcattgcttttgaattagtatttgaaaggattgtattttcagcaatacgtctatttaatgacgcatatcctttagcagcacttccaactgtacgtattaataaccctccagcaagaactgcaggtccaattgctgcaccaaaaagtgctaatcctactgaagcttttctaacccaaccagggagatgtgtaaatccatcaactaattttgttaaaccttccgctcctgctctaatcataggcgttaaatctttaccgacttcgattgctaatgattcaaaagcgccacctaattgttccagagcgcctttgagattatctttcatcaaatctgctgcttttttactttcgccattggaattctttaaggatttactatagctattaattttatctggtcccgcttcaatcaaggctaaaaatccacttgctgcttcagtaccaactattgtagccactgtagctagtttttgttctctcgtcatgcctttcatattatcttggaactgtctaatcaattcacccatgccaacaaattgacctttagcatcagacaaatgaatacctaattttttcatttccttagctgtatttttacttggattagctagcctgataaatgaagctcttagggcagtacctgcttgagaaccctctaaacctgagttagataaaacttcaattgctgcggaagtgtcctctattgaaactcctaatgcttttgcaggagtaccagcatacttcaatgcatctcccatgtactgaatatctgcagcactatcatttgctgatctcgcaagtaaatcagcaacatgatttgcatcagatgcttttaaaccgaaagagttaatcgctgaagccattacagttgcagttgtagccatttctgcaccacttgcttctgctgcactgataacacctggcatagcctccattgtttgtttggcattaaagcctaaagctgccaattcttccatacctttagcaacttcgttagcacttttactggttttagctcctaagtcaactgcttgattagacatgcttttcaagtctttactgcttgcttgcgcaatcgctccaactcgagacatttggccttcaaagtctgcacttgtttttaatgctgcacctaaccctaaagtaattggtgtagatacgcccatcgtcattgtacgtcccagggaagtcattttgtctccaatagaactaaatttctttgacatgacatccgcttgacttgcaagtttaccgaaatgactttgagctatcatttgttctttgttaaaagtcttcatttcggatgaagctttatctattgaacgctccaaattatttaaagcagctttttctttattaacagctgtttcagcttttgcgacattagcgctatgattcttaatagtattgtttaaatcattaaattctttttctgtttgctttaatttagtattagttttagcgtaagaactttcaattttatcatttgattttgaaagattgtcattttgcacttttagtttttgaacttgattgccttcttgtttatattgttcaacaagtgctttatgcttagcggactgcttctgtactgcgtcacttgctctttttagttgtgcagtagtagcttggttactattcttaagcttttgttctgcatctctcaactgtttaagtttttgatacgcatcttgtttacgttgatttgtacgtttatattgattttcagcttttttaagttctgtattcgatgattttaaggcttctttagatttatcaagagctaatttttcttttttattggcttctactaactttaaatatgctttctcaacatcttttacactggatttagctttttggtaattagcgttaacttgtttaagctcatcttctacttgagaatacatctttttttgaactttaagcctatcatttaaccccttaattctcgcctgatatttttccattgatttttcagacttatcaaatgctgacagattagctttcatttcactattaacaacacctaattgtcgctttaaacctttcatgccttcttggacacctaaatggtctaatttcagctccaaggtcatgccttctactttttcattcatattaacctcctttctagcttccaaaaagttttcttaaatccgtacctgtaatgactttttgttcactttgtttttcttcagtctcttctttattctcttcattaagtatttctaaaagttttacatacggctgttttctgacttcagttaatgtccacccatactgctccatacagaaacgttgtattttcttaatgttcgataaaatgtcttttattgagattgttcttctgtctttcccatctcttctggttcagtttctgaatcttcttcatcttcaccattgatttctcgaaatatatcttgtaaggcttttgtataagttttagtactcatcttgttcagaacatcttcttcagtcaatccttcatctttaaataaatctactaataactgtcgctctttttgtctcatttttgttgcgttaggtgcttcttttttattctcttgatttactaattctaaatactcatagcatttttctgcttcgcccattgttacatcttcttttgtatagctctctgtttttcctgttttacgatctttaatttcaaatttaatcattgtattagctccttttattcaaataaaaaagacgcagatatactgcgccttaaatccctatccgtttgttactgtcactgaaatttgtcctgacttatcgcttccatcagtagacatagcagtgattactgaagtaccttcagctacaccgtgaattgctcctgtattttcatctacagtaacaaattctggatgttcacttgtatatttcaatattttattcgttgctgtgcttggtgcaatgtttggctcaacattgtcatcggtatttaccataattgatttagtttctggtgtaaatgatacgcctgagactagaattggattggttttgaattgaggtacatcaactttactagattctttaccattttcttcccatgccacttggtaagtaccttttggataagttgtatccgcttctaaattagataaagttactgacactttgccttcaccttgttcagaagctacgacgtcgtctcctttataaacctttaaagttttagtcataaattattctcctttgatttattttgaaagcccctattctgctgaaactgttgcagattttgaattaactgctacttcaacattttgggggttagctgggtaacgaacttgcagaatcctctgaatgatcttcactgtccgtgtatccaacgaatacttttttgaagaattctgcttctccttctttaccttcatgatacccgtatacaataccttgtggagtaccatcaacatcaacttttctgttcatccagtcaccagttaattttgttggctctggtgcttctgctttttctcctcgtgttttaaattcaattgaatccaagctaaaagtacctttaagtagcgcaacgtacactggttgacctgttaaaccatcttcagattctccaataactgttacgtatggtgctcttgtattctctcctacccaagatgtaccatttttatctttagaacgaccaataactgtatttagatcttcacttggaatattaaaaatactcatgtcagacttaacttcattagtaccttgttttttcatccaaacacgtttgttagatgcaaacatatctactaaatctggtgctaaacctgtgatatttagatcaactgtaccacctttttcatcttcccatgtcatgcgtttaactacttttgttgcttctgggttaaaaactccaacgtataatcttttaaaacctactttataagaaccttgtccttctgccattgcttatttcctccttaaaaattaaaaagcacacctattcgatgcgctgatttttataatatatattttttggtatgccttgataacgtctcgacatcacataacgtttagtttcttcaaaataagcatctaactgactagatgcttgaattaaattttgttgatataacagatatcttattcgttttgttatatcaattgttttctgattatttgaagattctacatctatttgaattaagtattcttcactaagatatttatcagacatgaagtctgaaggtaaatcataaataggtgtaataacaacaaaaggtttggaagtttcagcattttcagtgactttataatagtatattctagaatttatatatgtttggagctctgcatcagataataaaatttcttttatggtgtttaatatattcatttatctggccaactccttttttataatttctctatacttccgttcattagcagctaatgtttttgcaataactccaaaacctcttggtgtatatttttttccatctcttgtataaccatgttcattcaagtgaataatgtttttgcgattcatagggcctacccattcaattaaaacagctctttcttgacttcctacttttgtataaggcttagatttagtcatttcttctatgctagcacccgtatctttaaaactctcgaattctttctttaaagcctttataaaaaattcagatgcttcatttaaagctctatcactcttagcttgcattgattgtttaccgtataccgattctaatttcttcaacacttcaggtatccctttaatttctacactcatttttctgataaaaccactgtattatagccaatatctggtgtatcaattcttatttctttaatgttgaataatttatcggaatataagcctctgtcaattttaactaagtgatttgtttgtggtagatattcaattttagaagacctcataattatggttagtcctgactttgattcagtcacttttaaaatttctctatctttcatagaaggattatatattttacaaaagcaactatacaatttcattttttcctcttcatctggatacggccctttatttacatattgaaaaaaatatgcgcgatctttaaattcattaaattccatttaaaaatcacctaccacttttttaatttcagaatcattttttgcaatcccttttcattaaaaaccttgcttctagattggtcatttgagtacccacgactttcataatctcttgcaatgatatatctaatcgctgtacaaaaaagcgggtattccaagtcatctttgtcataatctggaaccccacttaatagtaattcagacttagccgattgaatgagaccttcaattaaatcattttcgaaattatagtcaattctcaaccacaatttaatttcttctaaactcatttcatcacccctattcggctgatattacagctgatttagccttagctgttacattaaccttttggggcttagctgggtaatgaacctgtattttcttttgcttttgcaattctgaatgcactgtctaatgtacgttgctgatcataccatgcagttaatacaaacaaatattcgccttttttaacatctttatcagtgtcataagttgttccatcatagttaattccaaaataattgaaatctcccacaataggtttaactgctgcatctgtaaatactactggtttgccaaatactttttctgctggtgtgtcaaagaaatttgttgttccatttgaaagaacactaataattttgacataatctgcatatcgcatataaattgttgcgttatcacgataatcttcatgtaaatctgctaaagcgttaataatagcatcatacatgtctgctccctcaacttctttaacagatccattataaaatgacatgtgttctaatccagatttaggacttactgctaaggcatctttacgctctttagctgctaatcctgattgtagtgcgttttcaacccagtttactaaatctacatctgatccatgaattacagtatctgaaattgcagcaaatactttgaatttattagtagtgaacttgactgtatcaccttttgcttttaattcttttgctgtttctacgtctgtaatgaaatcatcatcgtctaaagtgtatgaaactcttggaatctctaaacctttaatgttagttagacgagctttttcacgtaattggtttttagcaaatggttctgaaacaatttctttagaaagtgtttttggtaagagcttatctccacctgaatcatttcctgttggtaaagcgtgtaataaacgttgtgcctccattgaaggtttttcaaattcatttggtaaaatcgcgtgacgataaaactctgccttagctttaaccatcttctcattatcacttaaagattgataagcttctcctttatctttaactttcgctttttctttctcttcaatgtcttgcacttgtctttcaacaatgttaaatctttgttgtaaacctgctttttctgtttctagttgtttgatgtcttccatatcaatatttggatctgttgctttctgactcaattcatcatttttattttttaattgttgtccaatcatacctaaggattgttttaattcatataatgtcggcatttcatttcctcctaataattcattgtcatttttaaaatttcgcattcgcgtttaattttttctcttttttctttttcttctagtgacatactttctttaggtgtttcaaccaattcaaacgtatctacatcatcgattttagtgattttgtctacatctttctttaaatcttctgggacgttctcgaaacgcttatattgctctttagagatactagcagttatttcattagctcctaaaatttcatctatcaagccgaaagacaaggcttcttctgcagtaagccaagtttctgcatctaacatctgttttaagtgttcttgatctaaatcttttgctttatctaaataagctgaattactaacagcatctgttttttcaagtaaatccgctgtctttcttaattcttctgcattacctacagtcataacccatgaattatgaatcattaaaaaactatttttgtgcataaaaatagtgtcaccactcatagcgataacactagcaattgatgccgctaaggcatcgacatagatattaatttttgcaggatgcatttttagcatattgtatattgcatgcccttcaaatacactgcctccagatgaatttatatgaacatctatttcactgatgtctcctagttcatctagtttatttttgaaatctgtagcagttacatcactttcaaaccatttatcacttacaatatcaccataaataaatatttcacctttactttttgattttcttttcatttgaaaatacttagctttcattgacatttttatcaccacctttcaaagattttcttaattcaagtggcgtgtcaattgggtataaatcaccgcttattagcggcttatctccaccttcaactggtggtaaatcttcccactctctaatgtcatttatagtgtagtaaccactacgaactgctttaaagtacacttctgcttgtgttgcactatcagcccttaaataagatttaacgttaaatttaaaatacctatttttttctctgtctgttttagtaagtagtttccgattaaattcttcttcatactgtttgacgattggcaataaggtatgctgcaagtaaaatctgtttaactcttcatttttcgcgaaatttgtatttgatcttgcatttaagaatactgagggcaattgaaaaacgttagctactctttctcttgttaaattctcgcttgccactatatcttcagagacatattttttaggtaacggttcgatttcaacaccaggctcttggaataatactccaccgttttcttcatagtactgtttgaaatcttctaacacttgctgccttttttctttacctacattggaaccatatttaagcatgaaagaatcaggtttttgcatttctgtaagattaaaggttcttactgcattatcaaaatcagttgtattcttcaacacatcaatcggactaatgccttgcaccatattagatgccacgatgtgtttaaaatgcaacatgtccatattatgaacaatcaatttatttccagttgcagcatgaatggaataataaagttcacgtgattggttttcaattaacatttcaacaacatctggatttaataagaaaagctttgatggttgatgatagatgtctcgttcaattagcacatatgcattacctttttcatttctgattgtttcaatttgattaataaaatcaaaactgctcagagaattattcggtgacactgtaagtaaatcagatacttctgtattaactactttataatcttcatacattttcaagggcaaactagccatcgaattagataactttgtaatagctgaaaatatcgtttcattagtttcaagcgtattattaattacaccccaaaaagatctatttttccatgggctaaagtcataaagcttagaagttgactgatcaatccaattgtctatcaattttttctttatgcgtgtgacaatattctcttttgcgataacattcacctccttaacgcattatgtctttaatactaataaactctatgtttccttcaccactatcagaaacaactttattcataatatctgtatatgtgtttaaaaatgctgcaaagccatctattttacgatatctgctttgcttagacggcaaccagtttccgtttctgtctagtttcaactgaacattattgatataccatttcattaaaggattattattaaatattattttcccatctaaaaacatttcttttaaatccttcaatgcagggctcaaggtcaaagctccttgtcttgtttcttccgtttcaaacccgtaattttttaactcttgatttagtttgaatgcgttcgctctatcataagtaattttttctactacataatgctcattcatcttaattatccaatttaaaacatcttggtagtcaatataaggcttgtcttgcactgttaataagccatcttcttcccattctctatagggtattttttcgttagaatattcaactttgtgcttaggaatccatgaatgcgataaaactgcaactttaccattatctaacgcaaaagtagcacacgcggctgtaaagtcctctgtttctgataaatcataaccaatcgtgcacggtctgccttccagctcttctaaagaaacaatttcattatttttttggagtgttgggtaatcaataaaactcatctcgtcattattagcaaagatattaaaccttttggttataaaatctccacgttcagctggtgttctcttagctttttcccactcttctttcatctcatctaaatttatagagacacctaagttgggatttgcttttatccagttcgacgaatcattaatatcatcgtcatcatccaaagatgctaaataataaaaagttctttcgtcttctatgatttgatctaaggtgtctcttcccgcttctaccatatcaacaagtggaccatctaattgataccctgctgtcgtaatgtagatgagaagaggttgtaaccttgcagctcttgagttttttataactgaaatcaatttatagtctttaaattcatgaatttcatcaaaaatccccatgtgtgtattcaatccatctaacttatcgctatctgatgcttggggcataatttttgatatcgttgcgtcataatggatttcatctcttaatgttctgaaatttttatcaagctttgggctagctttaatcatcgccttagattcatcaaatagaatcctagcttgtttcattacgtttgctaacaaatgaatttctgcaccattttctccatcttgtgatacagcatagttagcaaccccagaaatagtggttgttttaccattttttcgccccataaatatcaaagcttctttaaacctgcgcagttttgtttctttatgaacccaaccaaacaaactgccgataataaaatgttgccatggctgtaatacaagttgacgtttagatcctttggaaggtttacaaaacttttctataaatcgaataggacgatgcgctaattcttcatcaaatacccatttacctccattttctagatatctaagatgtctctcacattcttttctaacatatttgcttgtttttattttcccttgagtgacttgctctgcataccatgttgttaatagttttggtgaaggttcatttaaaactttaatagtcaccgaatccaccttcttcttgaactatcttttttctttgtgctgcagttaaacccatagacttgagtaagttatttagtgtttgaactgtttttgtcagttctatgcttaatggattcttaataatattgctcgcaccagccttgtttgtatgctctatcattaaatcactatttttaagctcatctcttaaccgacaataaaattcatatgtttctatatacaaattaattaatatgtcatcagattttttgtaatcttctatatattcttttagctgtttttttgttaacttcatataaagaccccctttcatgaaaaatttatccgcgttgctagcgtttgggcctctccggtacccggcgaaaaaacattttaagccgatgggcaggggggcataaaattttatttaaataatttttttatttaaatttttagaactctaattttcttaagattacttttgtcattatcatttgcatgaattttgttatgacagctataacaaactgacattagattatctaagtctaaagctttgttaaaatcttcatcaacataaataatgtgatgcacaatctttgcatctgttataatatcttcgcgtaaacacatttgacaaagataattatctctatctaatgctatctctcttaacttcttccatgcttttgaatgatagaaccaatcgtattgatatgacttacgaccatgcttataaatgttattatgcttggtcatctcttacacctctttgattgcataacaaaagacacaccgcttagcgatgcgcctcatgtatttatgtcgtataactttcagataactttatacatctttccgatactatcatattactacagatttgtaggccttttgcacaatctttgcacaatgttatttgatacctgcatgatacgctatcgctttaacaaagttctttcgtattgtagtaactgtattgcgatgcatgtgacaagcatctcctatttgttctatctttagcttcttatctttattccaatactttaaccttattactttcttatgatcttcaggtaactttaagtactcactttcaactgcttcaaccatctcttctaagttacgtaacatcttattagtcaataaccttgtcgccattaactcagttgttctaactggctctcctttttgtaacggtccatacacaatgttggtgtctagttctttcgttgggttaagtatctccattctcaatctatttatctctttcttgttctcatttaaattatatatttctgattcaatatatttaaatgttcctggcttaatatcatatgatgcctttcccatcttatacctccattacttatgcttagctattcttgctttaatagctttcatcaattcttcttgcgttagttctttattttgtaaagctttatatactctttgatctattgtgttatcggtcatgatatgatgaataatagtcgtatgattttgtccttgtctgtataatctagcatttgcttgttggtataattccaaggaccatgtaagtccaaaccaaacaataatgtgcccaccttgttgtaagtttaatccatgtcctgcacttgctggatgtgctataagcaacttaatgtctccactgttccaacgttctttatagtttgaatcctctaatgtggttgcttccttaaacctttgaagtattctttctttatcgtgtttgaagttataaaacaatagtattggttggccttgagactcctctataatttcctctaacttatctaacttcttatcatgtataagtcttacatcttcctcatctgtataaactgcgccgttagatagttgaagtagtttctgacttaatgatgccccattttgagctacaactgttccttcttcttccgattctaaaatatagtttttttctaattcttcatatacttttctttctttttctgataagactactgtttgtttagtatcaactctgtcaggcatatccagataatctttcgctttcatgcttaaacatatatcttctatttgtttatatatcttttcttcagatccgtctcttagctcccacttaaaaatatgttcgctaacttgatgagttggtttaaagtacctttctcgataacgactgaatgaagactcaagtctttcacctctgtctatcaaataaacttgagcccataaatcctgtaaactatttggactaggtgttcctgttaatcctataaatctattaatgagtggtaatttctttttaatagatttaaacctttgactcttaggtcttttaaatgtagacagttcatcaatcacaaccatgtcaaatggccattcttttttatattgatcacataaccatttagtattttctttattggttacatagatatcagcctctgtgtttaatgcatcatttctttctttaggtgttcctaaaactaaagacactttcagatgatttaaatggttccacttatcaacttcatcaacccatgtatctttagcaacttgtttaggtgctataactaacatttttttagtgtctaacaactgcaattcactaaatgctgtaagtgttgatactgttttccctagacccatatctaaaaacagaccgtatttctcattatctatcactttatctattgcatacttttgatagctatgtggtttgaagtcaatcgccaaatgttccacctaccattctgataaaagtatttacttgttctttattccataacacatatactttatgatctctattttcaaattgtctatgcacatatttttgtaaaggatgcaactttcctttttcttgcttcatttctacaaaatatgtttttccttctggcataataataattctatctggcacacctcttgttccaggtgcaacccattttaaacataaaccgtttagctttgttatctctttcactaaatatttttctaatgtcgattctttcatatattcaccttgtatacaaaatttatatttgtgttccgatgttgcatcaattcttgccaaacttttaaaaatagctgttagagggttacccctatacctctttactccctaacactactttttaaactttatagtgaatttgatgcaacattggaaacaaacagggttgaaccttacagcgagaagggaaagaggtgttgtatcatttgttgcatcaatgttgcatcaccaaaaatgatacaacacctaagattactttttacaccaccgtgttgcatcactcaaaaaatgatgcaacatttgatacaacatctaaaaatgtatatttattcaatatttcttatattaaatcctctaaactttcatctcttacatacgctatctgtacaccataatcttttccgaatcgaattttcccacttttattaccatcatatacagaccaattgtctaattgtcttaagatgtttgaaatctttctaatttccatagatcctctactatctcccttatctttaccaaaacattcaacaaacacttcaagcgcacagaccttatttctttcaacgtaatctacatttcctgttggtaacatatcaacatcaccttgataaaatcgtcttctttcaaagatgctcaagtcttcccaattgcttgggattggcgtgttaagatattcatcaataatacctgtatatggagattcctcagtatgtttactttggattgaacgcatttcttcttctagttcagggttaaggaacaactcttctccttgttcataatagtatttagcttctgcccagatttggtcgatctcttctttggttagtttagaccagttcacttcaactctctctggatttacagtcattggccaaaaacgtcttccaccagtttcatctcttaagaaatcaactttattagttgtaccaatgaaaatacattgccttggaaaatcttcaatataatgtccataagcaacacgaaaccggtcaacttgtttagatatgaaatgcttaatggcttcaacttcagcttttcttgtagctgcaagttctgccatttccattaaccaaacgccttgtaatgcctcatatgcttccttaccagtaacagaaactaaactgtcagaaaaccatgcaccacctaatttttttagcaaagcagatttacctacaccttgaggaccataaagtgtaagcatatagtcaaatttacatcctggctccattactcgagcgattccagcagtcaatgcctttttggtagttgttctattcacttcagtgtcttcaacacctaagtatttgataaataacttttcaagacgtttatgtccatcccacgatattttatttagataatcccttactggatgataagcattttgcattgctacgcttataatggcatcttttgttttgcctgaatggtgtatgtcataaatcttttcgatataacttcttaaactgctatcatcaccgtcttgccattgacgtattttaaaattattattccatggcattttccctaagcattcaatttgttttgtaaattcattaaatgctatttttccttttaaatttggatcattacgcaatataatttctatatttgggatactagctttgaaagtacctttcgaagtaatttctaacgtctcagaccatgcatcatcgctatttactatttcatcgaaatcctgcattgcatcagacattttgtcgttaattaattgctttttaacaacttcatcattttgcgctctttgctgcattgctttataactaggtagtcgattaaccggagtatctgtattagcgtcatcatcttgagcaccatataagtgtatgcgtactaaatcaaaactgttcacaagcataccgcttacgggatccgtattatgatgagaataggcaaacttgttattttcgtataacaccaatccacctgcagttgaaccttcatgataggtataacggttagtagaatgtttttcgtataaatcaggaataaaagtttctatagcttcttctatcgtataggctctacaaaatgcaccaacaattcccggcttttcttctgggtcgccttgcttatctgctaatcttttagtcttactctcttcccttgaagacgttggccattctaatgtgtcagtccaatcaacatattcatttaatattttatctgggtctaacaaaggtaaatcttcataggtaaagaaaaattccgcatcgttactagttgaaggccaatacattaacctatgtggttgataagttgtatcatcgaagtaatccatgccaacgatatctgcgactttacgcccaatagcttcatactcatctgcatttacatttcgttttaaaggaatcactaaacgcagtcttggacttatctctctatgcttatgtgttgaatataaacaatatgcaaaatcataaaacatagataatatgtcggtcatatcttgagcagcataatcgatatcaagtgttagcattgaacgattcatgacttgaccagcacgccgtttaccttcttttaaataaccgccgacaaatccgccaacatcttttatatctgcttgttcggacttagacattttattgtactcagttaaatcttctttagttctaactgtttgtgctagcttctgcataaagtcagaccaagccatattgtgattagtccaatgtgtggataggcgactagcagcataagaatatgagacatcacgatcatatttaattgtttctatttgagtgactttgtctaacatgttcggctcctttcattattttagatagagcagagaagccaacgcctctctttagcttttgaatctttttctaattcgttcaacttcattttcataatcttctaaaccttcaacaccattattttttactaactgcttgaaaagataagcattcatatactccaatgcttctatggttttcatcttatgagaaatgctacttaacaagatcaataaaaatatagataaaacaattgaaatgacaatccacatatttacaacacctccagtgctattgctaaacacattaatataattaattcaaaaatgataatatctattaccatgaaacttcagctctgattttttcaaagtcactcggcgcctctacatcatcattagccgtcatcataatatatacttgttcagttacatacttacctagctcatacattgctagtaagaataatagtcttagtatttgtttaatcattgtttatctaccttctttgcttcgtataagaccggatataaatttaaaaagtgtattctatatccaatcgtcttaacttctactttgtcgcctacttttaacctagcttgtatgtctgcgctatcaaatttctttttgaataataagtcggagttttcaatgacttgtttgttgtctaatacaatatagaacttgtcttctttatcttgtctcttgttatatttatctgtaattgtcccttgatgtacttctttgttttggtaactagccactgtatagataggcgatatgacaacaagcatcagtgcgattacgccgaataatcgcagtattccagcaataaagatatcgaaccaatccatatttttaagttttttaatcatcattgtcatctccggtatcaatcaaaaaaagtacctgtctcaacatactctttaactgttgttcgtttagaccagctaacatagggctgtaaaattcgctatcttcatctttgacagttttaataaagtaatcttcaatcttagctttttcttccggtgttccatttttatacgtcttaaatacctcagtgtgcttttctggtaatttcattttaggtatattaaacattattatttcccctctttaatgattttatttctcttcgaacaaagaacgtaatacttcttcactaggtctttcgaatagggttactttagaattattagtgtagtagacaactggagcattctgtgtctcgtacttctctttcgcttcttctttactctctgcctcaacaactgtatacctttggttgctcttagctcgagttatgtgtgtatgtttacgtcctgttgaatctttgaatgttgtgactaagtattgtgtcatttcttataactcctttgaactcgcttaagtttttctacgaaacttattgctaataacagaactaaagtagccattttgttgtacgcatctgcaaaaccaagtgttatagcaagaattataatcgccccccacttatacatatctgcacgattagcgttattagcttttaaatatccctcgattaaaatatcgaaaatcatataacccaaaactatcaaaagtaatattgttatactcacttccccaaaacctccttgactcgatctaagatgtctttacacgtatccttttcctgcgtctgctgttccatcttgtctttcatgattccttttcattttctttttgtatgcgtcaatgagttggtcgatagaatagtaagtattggcgtacaaaaacggcattattaaaacttgtacaatgctattatcaataccttttacaaattgttctgttagtgtatgcattacatgaacaaaataaactgaatgtagtttaggtaaagtaacttcattttcaattaaatcaaccataacctcagtagtttcttccaaatcttcttcatcaacaatagtcaaagttaattgcaaactgaaagctaagtaatcagcaatctcatctaattgtgtatctagtggcttacctggttgtttcttccaatttttaaaaaactcaagtgtgttaatccactctacaaattcaataatcatactagctactgtgtcatttaaatttctagttggtattctatcgtcgaactccttttgtatttgtaataactcttgtaactgatcaattgttaatgtgttagtcattttcctgctcctcctcatatttatagacaacttgactcgtcataatccctactgcttcatcaagataaatatcttctttgagtgcatcttgcatagcattaggtaaaccttcaagtatttcatcaaacgcttgcgctttcttatacacgtcttcaatctcttttagtaacccctctgtgtcattaccgttatacgcactagtactgatcactgattgttctatttgtttacggttattcatttgtgtcttcctccatttgccctaaaaattcgtagaactcatttgttccgtctagttcttccattcgcgacagtataatatctgcagtgcttttacctcctatatagagagctcctatcctgttcgctttgctctcagggtgtagttctctaattttaaaacagtaatgttcgtatcttccaagcaattcatttttgactgtgcgccacatgttctccagctcttcgttacgttttcttaacttagctatatcctcgataagctcatctcgttgcttcttgtactcatcacgttcgtctttaaaaacttttgattgagctctaaagtgtcttattgcactttgctcatcagtgatagagtcaacattttcagctccatgttttttcatgaaattaattaattcttctcttgttggttgtatcattatattgcctccactttttcgacttctatgcttgcagtttcgaacgggagctttttacgaatcagttttaataccatgttcgtggctttttcctcattcgtacttttcacgaaataatgtttctttaatttataatcacatttagatgcaaagaacttgatacaaagacatactttataggtttgcatcatactaccaactccccatctttccaaattaatgtcatagttttatcttcgtttagtatataaaacgctctggaagtaccgtctatcaactctctgattgaatcattttcatatatttcaaaacctttaatatcgtttagttctactagacaatcaaactcagtatcttcagtgacttcctctgtgatttctacagtaaaaatatctttatctgttactacttttgtataaaacccatgcccatcagttgaaaaatgtacttcgctacattctccaagcgtgcccattctatctgattgaaacactttactttcaacttgttcaggattgttccatgcccattccaccagttcgagtagcgtcatcttcttttttcttttaatctttgccattatttccatctcctctaaaataaagttggttgcttctgttcctcatattccaaatcatgttgctttatatatatttcgagctcttcagcagtatcaaatgtctttttcacgcctttaaacatcgttttataatgtccgtgaaagtaataagtgccattgacttcgtgaacatgtgcaacttgttcgttatcctgatacagatatctcttagatccgaaaaattggtttaagtattctttacatgcgctatcggttttaggcatttatacttcctgccacttcttgaacatttggttataagtgacatcgaaccagtacggatcacgtgaatgtttttgaggtacattaaacaaatgtggcttctttcttcttagctcagcttctttctttcgctgtctttccaatttacgttctttgctctctcgctccatgattttggataacacaatttctttatactcagctaagcgcataccataaggtgcatgtaaggcttctaacaacgcccagccacctcgtactctttttgcaaccattcctggagttaaaccattcttttttatcaattcattttcatgttcggtaaatttatatggtttaccgttaatctttacgatactcatttattccacctctatatatgcatgtcttattgttatgttgtcatactttagtaattcattcggattgtcatctaagcgctttgccagcgcatctttttcatcatccacatcatcaaaatgctgatattcaacttctgtaggtatccttatatcaatcgttgcatttatatatgcttgttgttgcattagatcacttcctcaacttctatgttgatatggtccgcatattcatctaaaacaatacaagtgtcaataatttcacctgtttcccaatccctatcatgctttacaacaaaatatcgagagatgttaaacttctcttctaattcctttattgtcataatctatcctcctaatccttcatatagaagggtgatgtaaatccgtcgctattcaaatttaaaccttctgcccattcaaccggcttattcatgatagtttcgatttccttaagtccatttgaacctctaggtatttctacaattacttcatcatggacatgaccaactattttaaaacctgatgcttcaagccttgctatagaaatcgcaagtaaatcccttgcagttgcttgaacaatattctcgactaacttcccaccatacgtttttaactttgaccatttacggttaagatctaagcccataaattcaacaacttgactaccccaactattttcaccaactgaagctttcggataagctaaagctcttccactaggcaattcaatcattagaaaaccttttttcatataaaatctaagtccatgtgtatgatgcgtctttcgggattttacagtattaattgcagcctcttggcaagccttccaaaaattaactatgttaggatttgcgttacgccaactatcaactaaaccttgtaactcgttttcttcaatgcccatttccaatgcacccattgcttttaaagctccagcgccaccttgatagcctaaagctaattcggacacttttcctttttgtctgagagggtcgcctttagttatgctttctaccggtacattaaacatttgagaagccgatgcttcatatatctttccgtgtgtgttgaacacatctaaacgccattgttcttttgcataccatgctatgactcttgcctctattgcagaaaaatcacttactgctagttcattaccttcttcagcagtaaatgtcgtcctaactaattgacttaataagtcttgaggatgaacattgagtaataaatctaaatcgtcaaaacgttgttctttaataagatctcttgctatttctaattcagtatctgaaatataatgctttgttaaattctgaagttgtacacctctacctgcccatcttccagtaccggcaccgtaaaattgaaacagacctcttacccgttcatcactgcacatcatgtcatgcattttgttgtattttttcacactggttttagacatttgcaatctaatttctagcatttttttagcttttcctgttgcttcttttaagtactcctgaaccgttttcttttgtaaattaggtatatctaatccttggtcatcctttaaccaagccaataattgtgtaggactattaggattttctaaacctgttatatgtttagcttgattaagcaattcttctttactctgcttatcgagcacattagctcctaacatcaatgatttagaaagcttaatacctctgtcgtttatatgttggtcaaaaacccaatatgcttgttcaattgcagttactggaaagtctttaattttatgagcaatcgtcatttctacttctacatctcgaatacagtaatctataaattgttgccatttttcaagatcatgttcaggcaagtttcttgttcttcctccattaacttttgttggtttacaaggtatagagaaataacgaattaaatttttacctgctttatctttttggttttgtagtcttaaaacttctccaactttatcaagcgaagcaggtaagccaatacgcattgaattaaccattgtgcaaatccattcttcaggtggcatctgtttattaaaatgtttagcaagacaagttctttcgaaattagcattgaatgcatacttttttacagcaggatcaaaaagagcaattttaaacgtctcaaaatcagcgtggaaaggctcattatctactttagtcatgtcaatcgcactaatcgctccaccatctattgaataagctataattaaaatttcgaaatcttcagcttctgtgtatttataggcaccacatttcgaaatatcattactgctatatgtttcaatatctatattcataaatctcaaattcttgacacctcaatttctttaaaattaaagtggggctaaaaccccacctattgacttataagaaatcctcatcatcagtgtctaattcatcgaaatcctcttctgctgcacttgcaccgccaagaggttcgcctttttctacaagttgaatgttgttcaatccaactgcgatacccttattaccatttgtgttgaaaggaaatagattaattgaagctctaatataatcaccacttacaacagttccagaatccgttaatctaattttgttttggtcaataataccaggtgcttgtttgcttgatgcgttaataaaataagcgtcttgataattcacatcatcttctctttcagtatctccatcacgtaatggaagtttcagatttgcaggaactttgcctccaaacttactaacttttccttcttctttagcagcttctatagcttgttcaatggcttttatcgtacttgtatctgatttaggaatgattaaactgattgaatactttgcttcttgcccttcttgcatactgtgaggttcaaaaatatgtgcatatgatgctcttacttttcctgtaatcactttagttttatttaatacttttgctttcatgtttatataccgtcctttttaatttttatagtttgtcaaaatcatcttcagcagattgctttatagctggtcgtttatcagactcggtagcaagtgttaatttaccttgtggcttttctataaagccctctgtaattttagaaaatgcttttttaccaattaatttttctaatttcgtaatgctaagtaacttggtttctgtaatatcttcaggtttataacccgcttcaactaacttttcaagcgttgcttttgtatcagttatcattcttcgcgaacgaccttctacaagcttccaaccaggatagtttttatcattttctttcgcttgatctagcgcataatgttctacttcatcagcccattttttgatatcaggcagtttatataaaagttctgcaatctcttcatcacttaacaaatgtggtggcttttgaggcacattttgcatgtattctgcacgtgttctacatgaatgctttatcttacagaatctacaatgactacctgctttaaactcaccttcaccgttataagcaagtctggctaatggtttaacaaaatcggttccccattgaagtaatcttgatattggtaactcttcagtagaaaagttatctattcgtggttgtatgatagtcatgcgaactgtatgaatgtcatacattaaactaagcagttcatatgcgcccaagccatataatctaagttgaggattatctatagctgaaacttcaatgcctttaccgtatttaaggtcaataatttcaagtacaccacctgaaaatataatgacatcaccagtaccaaaagattcagggacgtatttacctaaatccaattttgtttcaaataaagctattacatcgtcatctctactcaaagcttcgttatatttttcttctacattagctacgtactcttcaacatattcgcgcaactcttcactgtaatattgatttcgcttataattttgaaaagctttattaaactcaaactgtgttaggccttcatatttaagactgaaatataactcacttaactcatgagcgaatgtaccttcttcagcaaaaactgaacttttatctgcaataccttcacttgccttaatactcggtggacagtttagccattgttttgctccacttgcactaagctttgcatgagctctatttgagtgatctagcttcatgcatttattctcgcattcataaaatcaacaattttttcataatgctcttctttgatagtagatagcttatccgcaccaagttcgttaagtttatttctaaattctttcttatcagaagtatctgcttttttaaggaactcttttcctactgataaaacataatctttagttaaatcagcagaagtttccttaacttcttcaactgattccagttgagctgtttcatcttttggcattggtgcttctttaactttctcttgtacaattgatgaatctacagttgatagttcagtatttagcacacgtaaattcttatttaatagttttaattcttcaaaaataccttctaatattgccattgattaactcctccttaaaattggttggctaaacgaatcattaacttgatgcgttcttctatttctctagggtcatcactttgttcgtttaatcttgccaataactcgaattgttcttctaatatctctttcttacgttctacaacagttaaatgtaactgcggttcaacaacacgccagataccccaactttccaattcaatctttccttttttcttaagtcttgaaagtgtggattttgcatgtgttttagatatcccaaaaacttcaacaacatcatcagaattgaaattgtcatatgttgcaaaatgtgatagtattttttgttgtaaggtcatattaataactccttatataattatttaagacaattgctcatcttgcactgttacttgctccaacaagtagcagtttctttattcttcataaaagtattccttataaaatatgaatgttgcgatacttgcgaatcccgcaattgaccatgctgtagtgaagtatagaaacggcatgagtacaatcgctaagaccgtgaagcacaacactgctaataggtagcttttatatgtgtcgctcatttgataatcctcctaataccattttttatgctttctgatcaaatactcttctaatttagaaatattaatcaatgttcccgttgctgaataatcaatgtataaattttctacacctaaattatcttcacggtaatatttcaaccagttgtatactgtacttctacatactccaaacaattgatggatttgtgtaggtgttgcgtataactttttcacaaatttttcttcgcctcgatatgtgttttctggtgttggtggtattatgatttttggcatctctatcactcctttagataaatgttaaagtttgttattattcgccctgtattgaagttctctatctaatgcatagaaaactttgtttatttctaagtagctgtaatcactttttttaataagctctaatatttccgctcctaagttacgttccttttccgttaaataggatgaagaagcatcagctttgctagaaacttgtgggacgcctatacgcaatccttctgatcttgtgttcatttgtttatgctcctttcgtgtataatgttgttatcaacctaaggaggtgataacatgcccttgatatctgatgaatttgatacacttactaaagaccaacaatatatcttgtccgtactctacaaagattatttagaatgtgtaaagttaggttcggttaaattaacctgcaataattttggaagtgctaaagatatacatacaaagtattttcaaaaactacatttcgaagatgtaaaatacgatttaaataaacttaaaaactctgggttcctaaacggcgtgtatgctagtaacactatttatcatgtaacaatttcagacaagactgttgtttactttgaaaatgagtttaaaaacaatttaaaaagtatcattgatagcatttctaaaattgcttcaataattcctggtctctagttgggtttataacttcccaatcatttgccatgaggtcatcggctgaaggttgccaatatctgataaggtttgtcccatcgctatttgaaatgatgcattgtaaaaaactatcatttgttggtaatatcttagttcgatgactttctttccaatctttccgtgtcatagagacaagattttttgtagctatcttagttgcttcttgaatgttcatttgttattcctccttttaagatgtttatgatcctttctgctatactcctgttatggaggtgataggatgaaacttaatcacgattgcgttagactcttgctcttagaaatagaatctaataagaaaataggtgaaccacttactcgacataatttcaacgataatattatttttgataaatatgattttgaaacagtaatgtactcacttttaaaattagaagaagctaaatttatttgttgcgatctgaaattcatcgaaggcagggtcgtttcttggattattgatgacatcacttggtctggccatgaatttctcgataatattagagacaataaaacttggaacgaagttaaaagagtcgttaacaaaacatccagtatgtctcttaatcttatggggaaattagcttttcaatatctttctcaaaaattcaatctaacttaaattcataaccatcaaccaaggcatataagttattatttacgtatggtatttcttcaatggtgttgttgatgaaatgagatcggaccatcagttcatatccgtcattaatttgaatatctaatggtcgcctattaccttcttcgtcatagtagtaatagatgacttttttgttttgagcttgcatttgtcgttcctcctttaagttgttttgttatataatttagttatctcccagtggaaggaggtgaaatttatggatttagagaaaattgctcacgatattacaatctcgctattacctagagctctagatagacataagattcataacgaatggcaagaagtcggtgatgacgtaattgcattcgctaaagatagcgttgctcgtgactatttcagcatttactcttctgtgttattgggattacaagaagaagaaaaaagcagaaaagatttaggattgtaaggcaatagcgcacttgattacttgcactaattaagtgcgcttatttaattagatatttcttaccttctctatccgagaccactttatatttttttaatttgctttctttcacttttaaccattgatttccatgccacacgtcaattaagttttcgtgttttttattgaatagccttcttagtagtttcatttgtagttcctccttcattcgaaatcatcgatagttaattctgaaactctcttttcatagatatataaataatagtttttgatatctctataaatttttgctgctaggttgtattcactttcactcaagtctgaattaagtgtcactccaaaaattgataatgttaattttctaatatggtcatgaacatcttgtacataagctttttgatgaattgattcgaagccatgctgatacttttttagcggaatcggatgattgagcttcctcaatcttcctagcgacaaatcttttgcgaaattgagttttttattgatttcttctaaatcgtcattattgattcttactttactgaaaattgcacctgagctgattggtttctcgccttttatagcatttctaacttctttcgctataatttctttcaactcttctttggttaacgttatttgttccatagtgtcctccttatttttatttagttgtcactttcgaaacttaaagtttaaaaaaaatcatcaactttaacatttaaatgatctgctaattttttagcttctgaagttgtaaaatctctgccattaattcgatttatctttatactcaataaacttctactcattccgattgctttagcaacttctttttggttagttcctttaagtgcaatcaagctttttatttttaagtatggtttatctgctacactagttgtcattgaaccccctccttttgtttcgtttgtaacaacttgatttaagaatacatcataaaagtttcgatgtcaacaacttttgcaataatattttccttgcgtttcgttttcgaaacttttataatgaaattatcttatataaggagggtttcgtatgggtattggtgaaggtttaaagaagctaagaaaaaataaaaatatgactatggaacaattagcaactgatcttaataataaatatcccgacttaatgaaattaacgaaaggcaagatatcaaaatgggaaaatgaaaaggaagaacctcgattatcaactgccaaaattttggctgagtacttcaatgtgaagattaatgatttgtatagtgaatcaaatactacatacaaagacgataacgacatcacttccatatacaacaaactcacacctccccgccaagaaaacgtacttaactatgcaaatgaacaattggaagaacagaataaagtcacttctatagatggatataaagagtctaaactagtatcgtatattgcatgtggtgcaactggtgctggcataggagaagaattatatgatgacatattgcatgaagaagtattttttaaagaagacgaaacgccatcaaatgctgatttttgtattttagttaatggtgattcaatggaacctatgttaaaacaaggaacatacgcttttattaagaaagaagattctattaaagatggtacaattgcactcgttgtattagatggagtaagtcttatcaagcgtgtagatatatgcgaagactatattaatttggtatctctaaatccgaagtatgatgatatcaaagtcgcttcgtttagtaatattaaagtaatgggcaaagttgtattgtgattaatagcgcctatatggcactttaatataaaagacgtctatttcagcagtgtttgaaaggaagtttataatgaaaataactaattgcaaaataaaaaaagaaactatagtatatgaagttttaactagtggtaatcaaccattcacttatgagttacctaaagatttatcgtcacataatgcgcgtaaatacttggaatttatttcacaaaaaatagatggagataagttaaccaaagaagattcattatgattttactaaataaaaaaacgcctactagtgtagacgttgaatggtggtgagaattttatggtagataaaaacaaaaaacaagaaactactcgtagtaacccattaaacaaaagttttgaaaagtcaggcgccagccaaaaattaaaaagcactttatcagaaaaagctaagaaaaaagattaatattcattcattaaatataaatccaatttaatttgttgtttaaggtctacaagtgtatgtttaatatacaattcatcgtttgacggtaaatcagatactttgaaatcttgtcgctcaacctctagtaaatcgaaatcgctaccagctgaattataggttttaagttcaccctcttcaatgattctgttttcaaagtctttaataactataaatactggtttaccgttgttattaaacaacttgtctcttttgtctaataagcttatacaatccaaattcataaactttcttgtttcattaattaaccagataatgaatttaacaattaaaggattaaatacaagcactgttaaaacaaaaataattagaaaccaaatatttgcttttagacctgtaagcaactgaagtaaactcaaattttttaaatcaacattattaaaaattataaaagtataaaaccatatcaaacatgtttcaatagaaaaaatcaataatacaggagtattgataatcttgtttttttcactaactaaacctatcattgttagatatttatatggtatgtaacctaaaactcctgtaagaagaagcgcccctagaaattgagtcattttatcacctactttttattttattataacatatttagtacctagtactaaattttgggtagcccacctacccttattattttttacaaatttacagaacgtacgttcctacaggaggtataaacatgtggattgaaaaatttaaaaacaaaaataacgaaactaaatacagatattacgagaagtacaaagatccatacacagataaatggaagcgcgtaagtgttgtgttgaacaagaatacaaaacaatctcaaaaagaagcaatgtttcgtttagaagaaaaaataaaagaaaaactgaacaacaagtcgtcaagcgaattaaaaactttgacttttcacgcgctattagatgaatggcttgaatatcatataaaaacatcaggttcaaagttgactactcttaataatataaaaataagaattagaaacattaaacgatacagctctgagaacttgcttttaaacaaactagatacaaaatatatgcagatatttattaataaattatcagatatctattctcaaaatcaagtaacccgtcaactcggagatatgaaaggagctattaaatatgcagttaaattttacaattatccaaatgaatatttgttaactaatgtcaaaattcctaaaagaagaaaaacaatagaggatatcgaaaaagatgaatctaaaatgtacaactatttagaaatgaaccaagtcctacagatacgtgatcatatactaaatgataataagttacacaagcgaaatcgcattttaattgccagcatcttagaagtacaggctttaactggtatgcgcataggagaactacaagcactgcaggaaaaagatatagatttattaaacaaaactatcaatataacaggtacaattcaccgcattaaatacgaggaaggattcggatacaaagacactacaaagactataagttcaaaaagaagtatcagcatcaattctagaaccgtagaaatttttaaaaagataatactggaaaacaaaatgttgaaaagatggaattcgagctatgttgacagagggttcatattcacaacaaaaaaagggaatcctttatgtaataatcaaatcgccggtgtgcttaagaaaactacaaaagctttaaatatgaataagaaagttaccacgcacacatttagacatacacacataactttattagtagaaatgaatgtttctttaaaagcaattatgaaaagggtaggacatgtagatgaaaaaacaaccattcgcatatatactcatgtaactgaaaaaatggatagagaactaactcaaaaactcgaaaacattccaagttagcttaaatctgccctttttttgcccttatattttttacaagctttataaaacgcttgagaacactggcgttaaagcttttcttgaaataaacatatcatcataatgtgatggttcaaaaatctgattaacaattaacggtttcatatttctaactatatcatctaagtgattttctaaaatcggcgatgctgcctttaaatcatgtaaaaaatctgtccattttgttaggtttatttttaattcttctattgaattttcaaattgttttcgatcaatagaggattcttttaaaccatcaatgattcttttttcgtataacattgtaattaataaattaagaccatctataattccttttataatttctgttgtgttatttatatttcttactaactctttgaaattttcattataaactttttgaatataatcagataattcttcaacagcattatcaatatgattttttaaaatagtcatttttcttgataaatattttgaaaggttaactttacccgaaaccatatgttgaccattataattgatatttaggtttccatccataatagtagcatcttgataggacatgatactttttatatcagcaatttgattaccataaatgtcattttgatttttaattagaacgatattttcgctaacgatttttaaatgtttcatcatttcttccgtcacaccatcttgtaaatcatgatctaaatttttaaacatttttactaatattttatcgattgagtcgtgaattctttctattccactctggagttgactatcgaccttattaataccccactttaacggtttcaagtttaaagctggaactaaaattgcaataggtccaattttatccataaaagaatctatactttcaaataactcattctttttagatgtaatgtctctactcatattttctaaaacatcaatttcaattacattcttaaatttttgttttaacttatgctttctatctccaaaataagaattttccgactgagatatattaaaactttcatttaaaaatgtcacacattcttgtaacataatgcttgtttcccctgtaacaagttggtataaatcacctaatttctcaatatctaacttaatattttcccctttacctgacctcgctattgaatcccctgtccaaacatttattggaattctaccatccatgtctagatttatatttataacctttttcacttcttttccatttttaatctctgtatccttgaccgattctattttatgaacaggtatatccttatattcattagatttcgaattgaattcccttttaaaaccaagatgactatcaattaatccatttaaagttggaacaccatctcttatattaattcttttacctggcatttctttcgcaaatggatcttgtaaccatgatagtaagtcatttgtactatgaaaactaatcatatttttaaattttgaatttttatattgttcccatgaagcatatggtaacatagcaggattagaagcaactatattttcattttgatgtttggccccatgatattttgctcctgcgccaccttcggaattaccaccgtcagctacaatgcttttgtgcttgtaatttttaggatttgtattatattttctaagaaattcactttttgataatttatttgcatcttctatttttttcttatattgatttgaaaattcatccgcttgattcaaatattgtgtggacatatttgaatcattcattaatttgatgttttgtatccaatcatcaccgatatttttagacctaagtgggtttttaggattaattgcctcattagaagttccttgatagacgatagtctgttggcctgttggtttacttttatcatctaacaactcatatattttaatatcagcagcaccattcaaattcctatttttatcatcattgtaactatctacttgcataaatcgttttccattaactttaatttctttatttgtatttatatcttgataaacccagtaaccacttaactcagttaaatctctatcattaattttattcatctttacgatacactccatattctattggatcattatcatcataaaaggcttttttagtattaatagtaggctttcctatttgaattgtaattgtagatttttctggcttatttttaaaattatataatttatcactcagttcaattacatcatcaactgtattatctttagtaaaatttttctttgtactaaacaatgttgttactgtatctgtattagcagcgtaattcacttcttttctggcttgttccattccttctttaaattctttatcatttttatgaatcaatggttcgtaatacttacgatattcttttaagcttcttgacgagtaggtgatataaaaatattcatttttatatccgacattttgcgtcttgtttattgcttcttttgtaaagcctgtatattggtatttctcttcattatctttgaaaaatttatataagttatcatacttttctttttgcgctcgatattcaaagccacttagtactgtacccaccatcatactcatatcatcacctttgtcctcacttcttaatgagctatcactgtcaataattgatttgtcgaatggaatactcgcattaaatacgatgtcgtggtcatcacaatgcacgaatacttctacaccgtcgccactacctacaacattggtagctttaacttttaaaccgaagttatccataaaaaattgttcgcctcgtttggcaattttatctttatgcttcttcgcaaattcaatcgcatctttttctgcaagtggttgaaagccttggcctacatattttgaagcttccatttcttctggtacagattttgtttctgtttttgtgtctttttttgattcattttccatcgtggaacatccccctaaaattaatgtcgtagctaaaactgatccaatgaattttttcatatgacacctcgaataatttaattaatacaatatatctatattttaccctatttttataatcaaataaataactttatcaaactttatatttttgtataaattagtaatatatttaatagttgatattcgcaaaaaccttaaaccctaagtcctaatccacatacaaaactttcgacatcaatcaaaaaacgcatgctataaattagagtctctaatcaataacatgcgttctgaaataactatattcagttttattccggctttggtagtttgataataaacgttgtgccttttcctaattcgcttttaacatcaatggaaccaccatgctcttcgataatcattttacaaatgaacaaacctaaaccggtaccttgtttacctcgcgttctcgctgcatcaactttataaaaacgatcaaatacttgttgtaaatgttctggtgcaatgcctgtgcctgtatctttaatgtataaaatatcttcgctttcattttcatcacaagtaattgcaatttcatcaccaggtttcgtataacgtgatgcattatcaattaagttcgttagtacttggtccattcgatccatatcataactccaaacacgcttcttacaataattaaaagtcatatttagacctaaatcatcagcttgttggcgatacttaattttcatcttatctagtaacgctgcaataggctgaatttctttatttacggataacccttcagcatccatgcgagcgacatttaacaattcattaactaaacgatttaaacgtttcgattcatcaaggacaatggcaagcgattcttttatttcatccggttctgtaacaataccatctacaattgattcagtatagccttgaagtaatgatatcggtgtacgtaattcatgtgatacattagcaatgaaatctttcttcatttgatctagattgtgctcattagtcatatcacgaactgtcacaacaacgccacttttacctccctgttcaatcttgtcgatatagcttgtggtcacaacaaagaatcgtgcattcatttctaaatcacgcatttcagtttgttttgatttaaaagtatcttcaatttgtcttaataagaaagctttggcatcttcatcaatattgtccataatatcattcgccatcttattcgataagataatttgtcgactctcattaatacctaggacaccttctaccatagagttaattaagctgtctctaatatttttagatgtggataatgcgtcgacatgctcttcgatttctgtactcatctgattaaatgcctgcgataattgaccaatttcatctttcgttgtgacagaaggtttataagagtaatccccttcagatacacgtgtagcttggtctcttaagcgccttaaaggttttgtaattcttgacgataagaaaaaagcaaagactgttgtaattgttaagaaaataacagccgtaattatagtgataatcgtaatagcattatttgtatcttcgattgatttcaagtctttatatataaagactccactatatttgctatgactattcttctgtgcttttgttggatagcctaacaaaatatatgtttgagatgagcccttttctttaatcgttacatttcgagtaacagatttacctttatcaaacacatcgtcaaaatggtcgttgttgactacttcattcaacatttgctttttaatattagaaagtgaagctgaagattgacgatgtttattatttataatcattaacccaccagggttttcaattaatgtttgactatatttgattgcttcttctttattgtgcgattgttcgaccagtgaactaattcgtctagcatcttctcttatggcattttcggtttcttgtgtgaaatagtattgcataaaggtaattaacgcaatacttaataaaattaaaactgtcgtcactattaaaataatagttaaccacagtttaattacgacactatttagccggctcatcattagatttaacctcaaatttatacccaacgccccagactgtttgaatcatatgcgcagcttcgctagacacacgattcaacttttctctaagtcgtttaacatgagtatcaactgttcttaaatcaccatagaattcataatgccaaacttcttttaataattgttcacggtcaaatactttatttggtgttttagctaaatatattaataattcgtactctttaggagtcaaattgacttcttgattatcagcaagtacgcgatgtgcatcattatctatttctaaatgtttaaattcaatcacatcacgtgcgtgaggttcgctttgttctacagttgtagattgcgttcttcttagaagtgctttaactcttaagactacttctctaggtgaaaacggtttgacgatataatcatctgcaccagattcaaaaccttcaacacggtttgtttcttcacctttagcagtcaacataataattggtgtttgtttatgttcacgcaatttagttgccacctggataccatccatttcaggcaacattaaatctagtagtatgcaagcataattattctccattgcaagatcataagcttcttgcccattactcgcttcatggatttcaaaagattctctttctaaatacattttaagtaatcttctgattctatcctcatcatctacgataagtatttcgttcgacatacaggtcatacctcccacacatgcttttctttacaaaagtattatatcacaggaaaacgcatacagttattaaaaacctaaaattttgtgaaaaaattctcaaactttgtgataaatacatattttatctaattattttccgtgttcagcaagatgacgcattactttaacttcatgaggtgtcaatacgcggccttcgccagcatttaaaccaacaacatttaaaggtccatattcaatacgagataattttgttacttgatgaccaaagtgttcaaacattcttctaacttgtcgatttcgtccttctgtaattgtaatttcaaccaaagttgtatttttatctttatcttgttttttaacttttacatcagctggttgtgttaaaccatcttctaattctatgcctttttctaatgcttttacttcttctcgcataagatagccttttagtttcgcaacatattttttcttaatttgatatcgaggatgtgtcattaaattagtaaattctccatcatttgttaataataacaatccagatgtatcatagtctaagcgtccaacaggataaatacgagcatcaatacctttaaagtaatcagtaaccactgtacgtcctctatcatctgatacacttgttatcacttgtgttggcttatggaataatatgtaaatcttgtcctcttgttcaattttaataccttcaacttcaatcgtgtctgaaggcttcacttttgttcctaattcagtgacagttgtaccattcactttcacttttccttcagaaattaaagtttctgccttacgtcttgatgtataaccactgttcgctatacgcttttgtaatctctctaattctttagtcattattttctcctttttgattgactagattgctgaaaaaaacatccatttcttcatcgtcttcttcagttgttggcaaatcatctatacttgaaataccaaatacatttaaaaataaatcagtagtgattaattgttggctacgctgttcattgaccactttagcctcaactagtcctttggcaatcaatgttttaactgcaccatctgaattgatactacgaattaattcaatatcacttcttgataatggttggttataagcaataattgatagtacttccattgctgcttgtgataatttcatttgtgacttttgttcaattaattgttcaatgtacgttgccgcttcttttttagtcgttaaaacatacgtcattccaaatcgttgtattattaatccatgtgatgaataattttcaattaattctacgagttggtctttcgatatatctaaaatttctaatagctgtttttcatctaaaccttcatcgccagctgtaaataatagcgactctaatataccatgattatccaaaatggtagttcactcctctaacaatgttaatatcttcaaaattacgttgttgctcaatattaattattcctgcctttgacatctctaaaatagctaaaaagtgagtgactacttgttcaattggctcagaaaacgtaaacagactaaagaagttaaaatgatctttatctttcaatctcgatgtcacttgttctgtagcttgttgaatggtaaatgtctcttttcggatttcaacagatttaggtgtatttaactcaactctatttttaactctttgataagctacaattaattcagttaagtcaatcgtatgatttggatcccaagattcatctgtttccaaatgagataaatctgtcggtctttttgtaaaataaaaatctctttcttctttcatgtcatttaaaatagcagtatattctttataattttgatattctattaaacgcccaactaaatcttcacgtgggtcatcatcaacatccatatctgatgttgattgtggtaaaagcatcttacttttaatcattaagagttctgacgctaatactaggtattcacttgcaatattaatttcaagctgtttcattgcatgaacgtactgcatatactgctctgttaatgcttgcattggaatatcataaatatctatttcaaatttttggataagatgcagtaataaatctaatggtccattgaaagcatctaatttaacttcatacataatatctacctcgtattgcgtcatatgtgcataattctctaaaatattatagcatgaaaataacttacttttaaattggggtgataacaaaatgcaacaggcactgataaatttctattatcaatttcatactaagcaacattatttcctatgtcatgacattttagaagatgcatggaaagctgaaaataactacagtaagcaagatgcagttgttagtttaatcttgtttgcaactgcttgttaccattatcgccgcaataatttaaaaggcgcctataagtcttttaataaatctaaagaaataatacaaaatgctaaagatagagatgcgttataccttaatttaaatgattatcagttgttaattgagcaacagatagcaaagttgaatacagcaaagcctttttcatcagttatattaccaataactccagactttgaacgcatcatcaaggccaactatccagattatgattataatcacgaaacagcaacagatccttttattgtagaccatcacatgcggcgtgatcgttcagaagtgattgcagcaaaagaagaagcgattcaattaagaaaacatagacgtaattaattaaccaatttaaaaaagccacaatagcacagacatttttagtcatgtgtattgtgacttttgagttatggttcactttatgctctaggatgaaattggttatacatttttctaatttgagattttgaaacatgtgtatagagttgagtagtagatatgtcagagtgacctaacatctcttgcactgctcttaaatctgcgccattttccaataaatgtgtcgcaaaagagtggcgtaacgtatgtggcgttaacgtctttttaatgtttgcctttacaccattttgtttaatcattttccatattgcttgtcgtgataaaggtttaccatgcatatttaaaaataagacttcggtaacagtcttttttaaaagttgcggtctaatcgtttcaatataagtagttaagtactcaatgactgcgtcgcctaatggtacaattctttctttatcccctttaccaaatacgcgtacaaaccccattattaagttcacgttctctaactctaaatgtatcaattcagatacacgcattcccgttgcgtacagaagttctaacatcgtacgatcacgataaccattaattttatttaaatccggcgtttctaataaagccaacacttcgtcaacatttaaaacgtcaggcaattttttgtcatattttggtgaatctaataataccgttggatctttcgccgcatatttttctcttatagcaaattgatgaaaactacggattgttgaaataaatcgcgcaatagatttagcagattgcccttggtctattaaatgccccaaacactcttgaattaattgtcgatctataaaatcaatatgcgagatatgatgttcagtcatataatcttgatactttttcaaatcacgtctataagcaccaattgtgttagaacttagtcctttttcaatttgtataaagcgcaaatattcttcaataattgtttccataaccacacctctaaaaaagcgaaggttaatttaacctacgcaatttactatcctttacctttagcttggcacgtttcacacacaccatggaaagttaaacgatgatctaaaattttaaaattgaactcattttcaactcgattttcaacttctggtaacaaatcttcatcgatttcatctacacgaccacattccatacatactaaatgatggtggaaatgttttgcgccttcttttcttaaatcaaaacgagcgacgccatcaccaaagttaattttgtcgacaacttttagttcagctaacaactctaacgttctgtatactgtcgccaagccaatttcaggcgctttgtcttttacttttagatatacgtcttcagcacttagatgatctttttcattttcaattagaactctaacagtagcttcgcgttgtggcgttagcttatatgatgattgttgtaattgttgcttaacgcgatttaatcgttcttccaacgatgtccactcccctactaataattaaaatcattacaaattatttcaaacttcacaattaaaactaacagttttctcaataaaatgcaagcttttctcatttgttatttagaatgattataatttaataataggtgttgcaatgcaatgatagtcttcgcatcttctatttctttattcattagcatcgatttaacattctcaatcggaactttaatgacttcgacaaattcatcttcatctaagtgaactgtgccttcttctaaattatccgtaaaatatattgataattgttcatcacaaaaacctggtgaaccatacatatctacaacatgtgttaactctttggcaatatatcctgtttcttcttctaattcacgcttagccgcttcgactctatcttcatcatcttctaatttaccagctggaatttctagcaatggtttttctactggtttacgatactgtttcactaataagacttcttttttaggcgtcactgcacaaacagcaactgcaccattatgataaactaattctcttgttgacgtttcaccgtttggtaatgtcactgtatgaatttctacatctacaattttgccattataaataactgttcgatcaattgttttttcatttaaatccattataatcacgttcctttaaattcatattatatattgatacactatgcttgttagctaaagtgtatcgaaaggagaacagacatgcaaaaaaatatattaaaaagtggtattgcattatctgaattaggtctaggttgcatgagtttaggtacagatttaaaaaaagccgaacaaattatagattgtgctgttgaaaatggtatcacttattttgatacagcagacatgtacgataaaggtgtaaatgaatcagttgttggtaaggcacttcttaaatatcaacaacgcgatgatattgtcattggtacaaaagtaggcaatcgtttaacaaaagatggcagtacaacatgggatccgagtaaatcctatattaaagaggcagttaaaggttcactaaagcgtttaggtatagatcatatcgatttatatcaacttcatggcggaaccattgatgacccattagacgaaacaataagcgcatttgatgaattgaaacaagaaggaattatacgtgcttacggtatttcttctattcgcccaaatgtaattgattattatttaaaacatagtcaaatcgaaacgataatgtctcaattcaatttgattgataatcgtccagaatcattattagatgcaatccacaacaatgatgttaaagtattggcaagaggacctgtgtctaaaggattattaacttcaaacagtgttaatgtgctcgacaataaatttaaagatggtatttttgattattctcatgatgaattgggtgaaacaatagcctctattaaagaaattgaaagtaatttatctgcattgacatttagttatttaacatcacatgacgtgcttggttccatcattgtaggtgcaagtagcgtcgaccaattaaaagaaaatattgaaaactatcatactaaagttagtttagatcagattaaaacagcaagagctcgtgtaaaggatttggaatataccaaccatttagtgtagaagtcattttcagtaataaaaacagcggcatgaggcgtttcattataaaaatgccttactgctgttgtttatatacaattcgctataatttatgattaagattactcacttatgatagtaattaaagagttgtcctcacgcatcagtatttagtaatttcgccctgcggcagtgccttaagcaaacttctgccacttcatcttttaataattttattaaaacatctttctatatttcacttcgcatgttgattcatcattattagttattatttgtacacccagcacatttccttgcaacacaagtagtttgaatttttcacaagtataatataatgtactgtctgaaatttggtctacagaaatatcgcctaaaatatccagcactgtaaattcttcaaatactgatagttgttccgcatatcgcacacaaaatcttaccacactctccgattgacagttcattgccatcccacctatttatgctttatttttaaataatttaggaaaacatcgttcaaaaaatctaggcgcaatttgatacattttcaacgcataatgcatccatttaggcagattaatttccaattgttttgttttaataccataaatgatatcttctgcaagctgattagcatcaagcatcattttccccatctttttagcatacttcattgatgggtcggctttttgatgaaaaggtgtatcaatcgggccaacattaactgtcatgatatgtaagtttggtgactctagtcttaaagcattcattaatgcataaaaccctgctttcgatgccccataatgtgcagcatttgcttgtgtggaaaatgcagcttgacttgaaatacctacaatatgtgcgttagatgttaaatatggtctcaaaacagtatataaaacattaaaactaattaaattaagctgatacgtttcaatcatttctgaaaaactatggtctgaaatagatttgaaataacctaaacctgcactataaataaatccatcgaatgatgtattgtcttcaaattgcagtgcctgtatcgacttcatatcatttaagtcacacggaataacatttatagttttccccaattcctgttcaaagattctagttgctttatcaacatcacgcaccaacaatgttacatgcactttattttttagtaactttcggacaatcgataaacctaaaccactcgtaccaccagtcactataaaatgttgtcctttcatcaattaaccttccttttccattatatagaatgcaatttatcaactttacataattgagacaagttgattatctttcctaatatatatacaataataagaaaatataacatacaaatcaaaaactaaagggatgtgacgttaatgaaactcgtattttatggagctggtaatatggcacaagctatatttacaggaattattaactcaagcaacttagatgccaatgatatatatttaacaaataaatctaatgaacaagctttaaaagcattcgctgaaaaactaggtgttaactatagttatgatgatgcgacattattaaaagatgcagattatgtatttttaggtaccaaaccacatgactttgatgctctagcaacacgcatcaaaccacatattacaaaagacaattgcttcatttcaattatggcaggtattccgattgattatattaaacaacaattagaatgccaaaatccagttgctagaattatgccaaacacaaatgcgcaagttggacactcagttactggcattagtttttcaaacaactttgaccctaaatctaaagatgaaattaacgatttagttaaagcatttggttcagtaattgaagtatcagaggatcatttacatcaagtaacagctatcaccggaagcggtccagcatttttatatcatgtattcgagcaatacgttaaagctggtacgaaacttggtctagaaaaagaacaagttgaagaatctatacgcaaccttattataggtacaagtaagatgattgaacgttcagatttgagcatggctcaattaagaaaaaatattacctctaaaggtggtacgacacaagctggccttgatacattgtcacaatatgatttagtatctattttcgaagattgtctaaatgctgccgtcgaccgtagtattgaactttctaatatagaagaccaataaaaacaaacccgccaacacatgtatgcatcatcgcaagcactgtgtttgacgggttatttttataaattattactatttggcaagcattgtttattactttgtcattagattttaaaactatcaaaatctttcacaaaattaaaatttggtgtatcttcattttgtatcaatgtttgataaatttcatttatatcttctgtattatagcgattgctcaaatgtgtaatcaacgtacgtttaacattggcttcttttatcaatgcaaatacgtcttcaatatggctatgatgataattgttggctaaatgcttttcaccatctatataggtcgcttcatgtaccatcacatcagcatctctagaaatcacacgttcatttgaacatggttttgtatcaccaaaaattgctacaattggaccctgtttggactcacctctaaaatcttttgattgataaacttgaccattatgttcaaatgtatcatgagattttacttcttgatatttaggacctggttcaagaccaatgttttttaacgcttcaacattgattgtacctgtagtttcaggtgccattactctatatccatatgatggaataccatgattaagtaaatgcgcctctacagtaaaaccatcatgatgatatgttagatgatcatcgatttcaatatatgtaattggatagtttaaatgtgactctgataaattcatagacatttccacatatgctttaattccttttggtccaactaatgtaagtggcttttgttcaccgccctgaaaagaacgactagaaagtaatcctggcaaaccaaaaatatgatcgccatgcatatgagtaataaatatatgtgtcacttttcctaatttaattgcatgatgtaaaatttggtgctgtgtaccttcaccaacgtcgaaaagccatatggaattggaatatggttctaaatttaatgcgattgcttgtgtatttctttctttagttggcaaacctgcactcgttccaaaaaatgtaacttccatatatgcccctccttttcttcaattcattttatcataaaatttgtatcaatttagttttaatttattctttaatcaaattctgttaaaaattcgtctttgctagttaatttttctaactttaacgtagacataactatataaattttgataattacgttatacttatcattaataagtatcacattaaacatgatacatgaatcgatatttcatttaagacactgcatactgtcgagcatattgaatgacctgctgaatggattatcttataataataaatcatatatctaattaagaattgaggttttaatcttgagtactaaaaacaaacacatcccttgtttaatcacaatctttggtgcaactggtgacttaagccatcgtaagttgtttccatcaatattccatctctaccaacaagacaatttagatgaacatattgccatcatcggtattggacgtcgtgacattactaatgatgatttccgtaatcaagtaaaatcatcaattcaaaagcacgtaaaagatacaaacaaaattgacgcgtttatggaacatgtcttctatcatagacatgatgttagtaatgaagaaagctatcaagaattattagattttagtaatgaattagacagccaatttgaattaaaaggtaatcgactattctatttagcaatggcaccacaattctttggcgttatttctgattatctaaaatcttctggtcttactgatacaaaaggatttaaacgccttgttatcgaaaaaccattcggtagtgatttaaaatcagccgaagcattaaacaatcaaattcgtaaatcatttaaagaagaagaaatttatcgtattgaccactatttaggaaaagacatggttcaaaatatcgaggtattacgttttgcgaatgcgatgtttgaaccattatggaataacaaatatatttcaaacatccaagttacatcttctgaaatactaggtgttgaagatcgtggtggttattatgaatcaagtggtgcgctaaaagatatggtgcaaaaccacatgttacaaatggttgcattattagctatggaagcacctattagtttaaatagtgaagatatccgtgctgagaaagtaaaagtacttaaatcactgcgtcatttccaatctgaagatgttaaaaagaactttgttcgtggtcaatatggcaaaggctatatcgatggtaaacaagttaaagcataccgtgatgaagatcgcgttgcagatgactctaacacacctacatttgtttcaggtaaattaacaattgataactttagatgggctggcgtaccattctatatccgtactggtaaacgtatgaaatctaaaacaattcaagttgtcgttgaatttaaagaagtaccaatgaacttatactatgaaactgataaactgttagattcaaacctattagtaatcaatattcaaccaaatgaaggtgtatctttacatctaaatgctaagaaaaatacacaaggtatcgaaactgaacctgttcaattgtcttattcaatgagcgctcaagataaaatgaatactgtagatgcatatgaaaatctattattcgattgtcttaaaggtgatgccactaactttacgcactgggaagaattaaaatcaacatggaaatttgttgatgcaattcaagatgaatggaatatggttgatccagaattccctaactatgaatcaggtactaatggtccattagaaagtgatttattacttgctcgtgatggtaaccattggtgggacgatattcaataattgaattaaaacgcacatgttaaacaaaaataaatgagcgaatgacaaggattgattacgaatcaagtatatcaattgttctatcattcgctttttttctagactatattatgaaattatattttacaatgcccaaaactattttaataatcattgaacaaatgggtgtataatttatagaaataatgtagaataaaaataaatgattgaattaattggagtgaaagttttggacgttatcaagcaaatacaacaggcaattgtttatattgaagatcgtttattagagcctttcaatttgcaagaattaagtgattacgttggtctttcgccataccatcttgatcaatcatttaaaatgattgtcggcttatctccagaagcttatgcacgcgcgcgtaaaatgacactcgctgcaaatgatgtgattaatggtgctacacgactagtagatatcgctaaaaaatatcactatgcaaattcaaatgattttgcaaatgattttagtgattttcacggcgtatcacctattcaagcttctactaaaaaagatgaattacaaattcaagagcgattatatatcaaattatcaactactgagagagcaccctatccatacagattagaagagacagatgatatttcattggttggatatgcacgatttatagacactaagtatttgtcacatccttttaatgttccggattttttagaagacttgctcattgatggtaaaattaaagagttacgacgatataatgacgttagtccatttgaactatttgttattagttgtcctcttgaaaatggtttagaaatatttgtaggtgtaccaagtgaacgttatcctgcacacttagaaagtcgatttttacctggcaaacattgtgcgaaattcaatttacaaggtgaaattgattatgcaactaatgaagcttggtactatattgaatcaagtttgcagttaacattgccatatgaacgaaatgatttatatgttgaagtgtaccctctcgatatttcatttaatgacccattcactaaaattcagctttggattcctgttaaacagagtccttatgacgaagattaaataattaaaaacaaagaagccccctaatatatctataggtctacaaatggccttagatactattagggggcatattaatatgttaatttaattcgataacacatgcttcatatggacgtaactgttttaaattaactttggcatcataattaaatagcttcacttctccatgacttacatcaaatggtacagttaattctgcttcgtggttagtaagattacctacaataagaacttgcttttcatttaatgttctcgtgtatgcaaaaacttgtgaattttcagcatctactaaatcaaattgaccatatacgtatacatcattagactttcttaattgaattaaatctttataaaattgtaatactgaatgctcatcttctaattgttgtgcaacattaatagatttataattcggattcactgggaaccaaggttcaccatttgtaaatcctccatttaacgtatcatcccattgcattggtgtgcgagagttatctcggttctcatctttatatttcgcaagtaaagcgtctacatctccaccttgagctttcacaatttgatagtcattcttaacagcaacatcgttaaatgtttcaatactttcaaatggataattcgtcataccaatttcttgaccttgataaatgaatggcgtaccttgttgcaagaaataaactgctgcatgacttgttgctgattcataccaatacttgtcatcgtcaccccacgtcgatacacgtcgtggttggtcgtgattttcaataaacaacgcattccaacctttattttcaagttgtttttgccatctatttaatacagatttatacgaatttacatcaaagtgagaatcaccactattccacagtcccaaatgttcaaattggaatatcatattaaatttaccattttcttccccgacccagtcatcagcatcatcagggcttacaccattcgcttcaccaacagtcataatgtcatacttacttaatgagcgatctttcatctcttgtaaccaagtttgtatacctggctgattcatatctacatcaaatgctggggcatatgttttaccctcaggtacaggtaagtcacccgcttcaaacgtctttttaatatgtgtaattgcatctactctaaatccatcaatgcctttatcaaaccaccagttcatcatttcgaatacagcatctctaacttccggattatcccaattcaaatcaggttgttttttactgaataaatggaaataatattgctcagtattagcatcatattcccatgtagatccattaaagatactttcccagttgtttggttcagagccatctggctttggatcttgccaaatgtaccaatcacgtttgggattgtctttactagatttggattctataaaccaaggatgttcatcagatgtatgattcacaactaaatctaaaataagcttcatacctctatcatgaacaccttttaataaacgatcaaagtcttccatcgttccaaattcatccataatctcttggtagtcactaatatcataaccattgtcatcattaggtgatttaaacattggactgagccaaatgacatcgatacctaaatcttttaagtagtccaatttatcaatcattccaggtaaatccccaataccatcgtgattactatcattaaaacttcttggatatacttgatatgctactgcttctttccaccattgcttattcattttaaaactcctttgctatcgttgtgttgattttcttatttttaattctgtatctataatgacgagttcaataacatcctgtgctttgttttttaatatatttaaaattgctgcaccagcctgttgacctaacattcgaggcttgatgtcaatacatgtttgaggtggtgacgcaatttcggttaaataagaatcattgaacgttgctgtcattacatctttcggaatttcaatattaagttcatataggacacttaaaatcgctaaatgtaacatagcatctaacgaaatgattgcctgtttaatatttgggtccttcaaacgcgtatgtagattttgcatgtaattaaaaataacttctctttcattactagtctcaataatttgataattaattttattttgagaagctatcgtttcaaatccttgaatcctgtctttcgaaacttcaaaatcgcctttttctgtaataaatattaattcatctacaccttgttcaataacatgtcgtgtcaaattttcagaagctaatatattatcattatcaatgtgtgtaaattgatgatctatatccgatgtaggcttaccaatcacaataaatggcatgctttcatcaattaacatttgtttaatcggatcattttcttttgaatagagcagtataaacgcatcaaccattcgttgtttaatcattttataaacttcatccattaaatcattcatattatttgagactgtcgtttgtgtaccatagccatgctggttacacgtttcagaaattcctagcaatacattgatgtagaatggattcagtcgaataggctcctcagaaccttttaacactaaaccaattttatatgtttggtttgtaattaaagttctagcagcggtattaggaaaataattcaattcttccataactttcttcacttttgaaattgtcgcttcgctaatacgttgatttccttttataactcttgaaactgtcgaaggagaaacaccggcttttagtgcaacatctttaatcgtaaccatttaatcacctcctgttaatcactgcactggaaaacgcttccaacctttgtataatatcagtttagtcacactttctaaaaaagtcaaaagatttgtgcaaacgattgcataaaacgataaaaataaaaccttcatactgaaattcaatccgaaaatcaatataaaggtttgtataaaaattaaaatcgattgtttagtcactaactgcaaaatagttaccttggccatcttggaaattaaatacacgttgaccattcatttctactatatcatgcccagttaaacctaaatcatttaattttgagtataatgcatcaaagtttttctctttaaacattaaagatggtgttcctaggttcacctccgggctatacttttcaataaattcttttgccataatcgtcaatgacgtttcagcatctttcgtaggtgatacttcaactgcaacatagtcctcagctaacggtgtttcacttacaacaacaaattctaaagtttctgtccaaaatgctttcgctttttcaacatcatcaacatataacataacttgatttaacttttccataaaatagtacctctatttctctatagtacatgctatcataacacagtaaatattttattacttcacaaaatgcttaaaaatatggcgggatgcttttaaggtaatagatattgcttgtgtaattttttataggttgtagctactctatcacactctcttttatatttatcaaaagatataaaaaaggatagtatctttcaactatcctttaatcaatattattcttcaatccattgtgtatggaatacgccttctttatcttttctttcataagtatgtgcaccgaagtagtcacgttgtgcttgaattaagtttgcaggtaaatcagctgcacggtaactatcatagtaattaatacttgatgagaaaccaggtgttggtacaccattttgaacaccagttgcgacaacatcacgtaacgcatcttgatattcagtaacgatgtttttaaagtaaggatctagcaataagttttgtaatcctggattattatcgtaagcatctttgattttttgtaagaattgtgcacggataatgcaaccttctctccaaatcatagctaaatcaccaagttttaaattccattcattatcttcacttgctttacgcatttgcgcgaaaccttgtgcataagaacaaattttactcatatataatgctttacgaattttttctaaaaagtctttcttgtcaccatcaaatgatgcttttggaccatttaattctttagaagcatttacgcgctcttctttgattgaagagataaaacgtgcaaatacagattcagtaataatggttaatggaatacctaattctaatgcattaattgaagtccattttcctgtacctttttgacctgcagtatcaagaattttttcaactaatgcttctttattttcatctaatttcatgaaaatatcaccagtgatttcaattaaataactttctaattcaccagcattccagtctttgaacgtttgagcaatgtcttcatgagacatacctaataattctttcatcatagcataactttctgcaattaattgcatgtcagcatattcgataccattgtgtaccattttcacatagtgtccagcaccattaggtccaatataagtaacacatgaagcaccgtcttttgcctttgcagcaattgcatcaagaatatctgcaactttgttataagcttcttcttgtccacccggcattaatgacggaccagttaacgctccaatttcaccaccagaaacgcccataccaataaagttgattgcactttgtgctaatgctttattacgtctgatagtatcttgatagtttgtattaccaccatcaattaaaatatctccatcatctaataaaggtaacaaactatcaatcgtagcatccgtagctttacctgcttgaaccattaataaaattttacgtggtttttctaaagaattaacaaattcttccaatgagtatgttggatgaatattttttccttttgattcttcaaccattaaatcagttttttcacttgagcggttaaatacagatacactatatccgcgtgattcaatattccaagctaggtttttacccataacggctaaaccaataactccaatttgttgtgtcatattacttacctcacttgttgatttttcattagtattgtatcacaaaatagacatacactacactatatcatttcgattgtcgcgcaactattttgattatttctaacacttgacttgcaagcaagttcaatgatttaatcggcattctctcatttgttgtatggattttttcataacccactcctaaaatgactgaaggaataccaaatgtattaataatactgccgtctgaaccgccaccagaaataattgtatttgcagataatcctaaattacgagcactttcttgtgcaattttaacaaccgtttcattatcattaattttaaatcctggataactttgctccactgtaactactgctttcccacctaattctgatgcagtagtttcaaacacatcagtcatatgtttgacttgtgtttttattctttctggatcgtgagaacgcgcctctgcttctaagatgacttcatctgcaacaatattcgtagctgaaccgccatgaaacttaccaatatttgcagtagttatttcatcaacttgtcctaatttcattcgactaattgctttcgccgcaatattaatagcactaacaccctcttttggcgtacttgcatgagccgttttgccaaaaattttagctgaaattaacatttgcgtcggtgcacctacaaccgtagtaccgacatcagcacttgcatcaatagcataaccaaagtccgcgtccaacaaatctgaatttaattctttagcaccaattaaacctgattcttctccaacagtaatcacaaattgaatttgtccatgtgagatttgttgttcctttatcacttgcaaaacttcaagcatagctgctaatcctgctttatcatctgcacctagaatagtcataccatcagagtaaatgtagccgtcatcttttacaattggctttacattaattgcgggtacaacagtatccatatggctcgtcaaatataatttaggtacttcgccttcttcgatagtactattcattgtacacactagattattggcacctaatttaggatgtttagccgcttgatcttctttaacatctaaccctaatgctatgaatttttcttttaaaataggttggattgttgattcattccctgtctcagaatcgatttgtacaagttctaaaaacgtattaagtaatctttgctcattaatcataatggaaccccttttatccaaattttcaagtacgccaaacggtaaaaattgatgaaataaaatgttacagtaattgacgttacacagatttatcaggcttgtaaattgtgtcatattattttcaatttaatatatatatttattgtaactcaaactaagctttgtcaaaaatatattgattgatttttcaaagatatcgtataatgaggaaaatgacataagcaaacttactcatgttttttataatattcctttatgatgattgctagttatatcgtctcaagttaaaagttttatatcttatgtcgtaattattaatacaaaggttattcatttggaggcacacaaaatgcaaaataaagttttaagaattatcattatcgttatgcttgtatcagttgtattagcattgttattaacgagtatcattccaattttataaactatatctcaactacctatacaaaatcatacaattaaaaatccatccgttataaacacatgtattaataagttatcgtattgcaacgattactttcaaacatgggtcatacggatggattattttttaagctacttcactatgcattttcaatgaaccaaattgcgatttgatttgtaaatattcttctaattcatttaatatttgaataatacttgctctcgagttaagcgctttgtgtgttgttggcaatggcagttcatccaatttcaaacgcgtctcatacaaattgtgtaaacgcattgctgtatagtcattactattcacatttagaccaatttctttcagcagtgacgcaacatcatttaaaagtggatctttatgacagatactttcgatgagcggtttcattctcattaacaattccacttgctcttctcgcatatcaaaataatgatagtatgaattttcgtttctaacaaaatgatttttaacatctcggaacgcgatagacttcgcctttttaatatttaaaagtaacgcttcaaattcaatcgcaatggtatcttcatatttttcacaaatataactatatttactaaaaatatcagcaatttgttgctcaattttacatttgtattcgtctagctgtttgtctaaacttggcatcattaaattcattgtaaatgcaatacttagtccaattaacagtaataatgtttcattaacaattaaatgtgtatcaattgattttgcattaagaacatgaagtaatataacgcaactcgtaatgacaccttcttgtacttttaatacgacagttaatggtataaataacaatacgataataccgagtacaattggactctgacctaataaactaaatattgctgaacctaaaaacaatactaaaaaacatgatactaatcttgaaataatcgcttgtagcgaatgtacttttgtatgtttaatacataatacgactaatatggcgcttgaagcataattatctaaacctaacagcttactaataattacacctaaagtcatacccactgctgtttttattgttctaaatccaatcttgtaaggatttaactttaacatgggttagcgcctcttatctttcttcacaatatttattgaataatgtttgtaattgattaattacgttcatcacatcatgaccttcgatttgatgtctttcaatcatttctgtaatctttccatcttttactaatgcaaatgacggacttgaaggcgcataaccttcgaagtattcacgcgctctttgtgtcgcttctttatcttgtccagcaaatactgtcactagacgatcaggtaatacgtcataatgtaaagcatgtgatgctgctggtcttgcgataccacctgcacaaccacatacagaattgatcataactagtgttgtaccatcttgtttaagaactttgtcaacatcttctgcagtagttaattgctcatatcccgcagattcaatttcattccttgcttgttctacaacaccgttcatgtataaatcgaaattcatgtccataagttcaatcacctatccctttatatttaaactatcctcattctactaattaataacatattgttcaataaactaatctgaatcacacctatatttagacacaattttaacaatataccaaacattattgtgcttaaaatcatggaaactaatttgttcacctgttttcattaatatgtttcaagtatgatgtcttattttgactttactgcaaaaatgtattcaaccatgttgattattgttctttacctttttttgaatatattgcaaatattttattgccccaaaaaacatccatcgacaagaacaagataaaacaagttgtcgatagatgcatctatgttatcactaatatatatttgtattttctaaagtatactgttcgatacgctgtttaatatgattcataaatttaccagtttgtaaaccatctaaaatgcgatgatctattgaaatacataaattcatcatacttcgaattgcaatcatatcattaattactactggctttttaacgattgattctacttgtaaaatcgctgcttgaggatgatttataatacccattgatgatactgaaccaaatgtaccagtattatttaccgtaaatgtaccgccctgcatatcttcagctgtcaattgcttattacgcgcttttgttgctaaagtattaatttctctagctatacctttgattgacttttcgtctgcatgcttaatcacaggtacgtataatttattttcatcagcaacagcaattgaaatattaatgtctttatgtaagacaatttcatttccttgccagctactatttaataatggatatgcttttaaagcatctgctacagcttttacaaagaaagcaaagaaagttaaattatatccttctttatttttaaagttgtttttataatggtttctcgtattcacaaggtttgtagcatcaacctctatcatcatccatgcatgtggaatctccgttacactattaaccatgttttgtgcaattgctttacgcacaccatttactggtattgtgctattttcactattgtcttcagatgattggttacttgatgtatctactgaagttgattgtgtttgaacttgtttgtcagattgagctgtggtaccaccattttcaataactgacattaaatccttcttagttacacgaccttcaaatccactacctacaacttgtgataaatcaatgtcatgctctgaagcgagtttaaatacaacaggtgaaaagcgaccattatttcgtggttgattttgtttagaagtagatgtctgttccactgttgaactagcttttttagtagatttctgagtatgctcatccacttttgcttgtatctcttcagttgtttcatttgtcttttcatcagcagcttcaattttacagataattgtatcaatagctaccgtctgccccgcttcaactaaaatttctgtaattgttcctgatatcgtggaagggacttcagccgtcactttatctgtaataacttcacataatggttcatattcatcaatatgatcaccaacagaaactaaccattgttcaatggtaccttcatgaacactctcacctaacttaggcattgttatttccatgactttccctccctagaattctgctaattcacgcattttatttaagattttttctggattcatcataatttcattttctaatacaggtgaaaatggcatagatggtacatctggagcagctaaacgcatgattggtgcatctagttcaaacagacaatgttctgcaataatcgctgacacctcagacataatactaccttctaaattatcttcagttacaagtaaaactttacctgtatgtttagcacgatcaataattgtttctttatctaatggataaacagttcgtaaatctacgacttcaacattgataccgtctgctgctaaaatatccgctgcttgtaaacaataattgaccattaatccataacaaaatactgttaaatcttcaccttcacgtttaacatctgcttttcctaaaggtacagtgtaatattcttctggcacttcttcctttaagaatctataagcctttttatgttcaaagtataaaacaggatcatttgattcaattgaagataataatagacctttagcatcatacggtgttgaaggtataacaattgttaaacctggtgatgaagcaaatatactttcaatactttgtgaatgatatagtcctccgtgaacacctccaccaaatggtgcacgaatcgttaatgggcattgccaatcattatttgaacgataacgcattttcgcggcttcactaataatttgatttgttgcaggtaagataaaatctgcaaactgaatctcagcaattggtcttttaccaaccatagctgcgccaatggctgttccgacaatatttgactcagctaatggtgtatcgataactctgtcctcaccatattgttgttgcagtccttgagtagtaccaaatacgccaccttttttaccaacatcttcaccaagaataaatacatctttattttgttgtaatgctaagtcttgtgcctggcgaatcgcctctaaataagataatttagccattagttaagactcccttcttcgtacacaaatgcataggcttcttcgacgcttggatatggcgcgtcttcagcagcctttgtcgctttattgataatgtctttatgttctgcttctatttctgtcaaccaagcatcatcgataatgccagctgaaagcaactcttttttgaacttttcgttgcagtctgcttttttaagcgcttcacgctcttctttcgtacgatattggtcgtcatcatccgatgaatgagctgtcatacgagaagttactgcttcaatcaatgttgaaccctgtccagaaatagctcgttctcttgcttctttcatcgctttatacattgctaaaggatcattaccatctacttgttcaccatgtataccgtaaccaagtgctctatccgataatttttcagctgcgtattgtaatgaatcaggtactgaaattgcatatttattatttataatgacacatacaaaaggaagtttgtgtacacccgcgaagtttaaaccttcatggaagtcaccttggtttgagctaccttcaccaacagttgctgttgcaattttcttcttaccatccatttttaaagctaaagcagcaccaacagcatggggtatttgggttgctaccggtgaactttgtgacaaaatattcttagctctactactaaagtgtgatggcatttgttttccaccagagttaacatcgtctttctttccaaacgctgataaaaacgtatcatacgctgagatacccatataagtaacgaaagctagatctctataataaggcgctgtaatatcaccttcttctaatgcgtatgccatcccaatctgagttgcttcttgtccttgaccacttacaacaaatggaattttacctgcacggttcaataaccacagtctttcatctatttttctacctaaatccatccatttatatattacttttaggtcttcttcgctaaggcctaatgatttataatcaatcatgttaaatcctcctatttatacgtgaatagctctactttctgctttcaatcctaattccatcaacacttcagagatggaaggatgtgcgtgtgttgttagtcctaattctaatgccgagccattcatgaactgtaacagtgatgcctcattaatcaattctgttacatgtggaccaatcatattaatacccacaatttcttcagttgattgatcaatcaccatttcgctatacccttcgtttgcgtcatggctatcaatcactgctttaccaattgctttaaatggtactttaaaacttttaactttcattccctctgcctttgcttgctcaatgtttaaaccgatagaagcaatttcaggttgtgaataaatacacttaggcatcatgttatagtttactgggattgggctcccttcaaacatatgatcgacagccacaacaccttcttttgatccaacatgtgccaattgtaattttccaatacaatcaccagctgcataaatatgtttatcttcagtttgttgaaattcgttcgttaaaatatgtcctgatgttgaaagttttattttagtgttgtttaaaccaatatctgatgtgttaggttttctaccaatcgatagcaacactttatctactttaattatgtctgaggtgatttcaaatgtaacaccatcatcgttaacatttatatcattttcagaaagttttattccctcatagaatttaacaccacgtgctgacaatgatttttttaatagttgtgaagcttgtttactttcagttggtaaaattctttcaccagcttctataactgttacgtcaacacctaaatctatcatcaatgatgcaaattccattccgataacaccaccaccaataataccaatacttgatggtaacgtctttaatgataatatatcatcgctagataaaattttatcatgatcaaatgataagaatggcaactctgcaggcgaagaaccagttgcaattaatacaaattggttgggtaataagtctgattcaccatcttcatattcgacagaaattgtgccaatttgaggtgaaaatatagatgtacctagaatacgtcccgtgccattataaatgtcaatgtgattgtgttgcattaaatgctttacaccttgatacatttgattaataatgtcttcttttcgtgccaacatattttcaaaattaacattagcatctttgacatcaacgccaaacattgctgcctgttttactgtttgaaatacttcagcagatttaagcagcgatttagtaggaatacaacctttatggagacaagtacctcctaatagttgtcgttctactattgccactttcttacctaattgagacgcacgtatcgcagcaacatatcctgcagtacctccaccgagaacgactaaatcatattgtttctctgacatgttcttactcctaactaatgatatatatccattgaaaatttattaatacatagttttcatgtccattaattacctattttacatgattgtctatttagtttgaatgcacataaataaatccacaaatgagtattcaacacactttggaaattatctatgtctttgattgtgttgtatcatttctcttgcattttctcgagttaaatcagtaacacttgcacctgaaatcattcgtgcaatttcatctactttatcatcgccaattaactcttgaacttgtgttgttgtacgatcatcttttgatgatttcgaaattaataaatgatggtcactcatcgatgcaacttgtggcaagtgagaaatacaaataacttgtatatattctgctatatctcgcattttctctgccattttttgtgcggcttgtccagatacacctgagtcaacctcatcgaataaaattgcagtttgacctctcgatttaacaaaaatgctttttaacgctaacataattctagaaagttctccacctgacgcaattttatttaaactttttaatggttctcctttattaggactgattaaaaattctacaaattcaattccatcaatattcggttcttctaattttttaaatgaaatctcaagatttgcatctttcatttgtaagttttgaatttccgatacaatgtggtctcttaactccctagcgactatacgacgctgcttagataacgcttgtccaacctctataacttgattatacaatgcatttatttcttctcgtaactgcgatgtactttgttcatagttttcaattttattgatttcattattaagtttttcttgatatgcgattaattctgaaatatcttttccatatttgcgttttaaattattcagcaaattcatacgagattcatactcgtttaacacttgttcgtcgaattctgtattagccatttcatcatataactcatgttttgcatcttctaaaatgtaataaaattgatcaatatcttcttttaatttgtcatatttgtttggaactatatcgtttattgttaacaaatggttgcttagttcatacaaacgatcagtgatagcattttcatccgttaatgtcatatgtgcgttattaagcgctaagcttaatttttcagagttttgaatgcgtttaatatctatttcaagtcgctctatttcgccttcttttagatgtgcttcagacaattcttctaattggaatttcattaaatctaaacgctgcagcaatgcttggtctgctgattctaaatcttctaactctttctttttggctttataattttgaaaagtttggtgatatttatccaacaaatcttgataacgtgattctgcgtaattatccaataatgttaaatggtatttttgtttcaacaaagactgcgtttcatgttggccatgaatatctaataattcttgcataacttttcgtaaatcttgtaaagtaactgtttgattattaattttacaaagacttttaccagagctaaaaatttcccgtttaactaataaaaaatcttcatctacatcaatatccatatttttcaatatatgtatagcatctttactctcgtcaatatcaaatataccttcgatgacagcctttttttcaccatgtcttacaaaatcagatgaagctctcattccaattaattgtccaattgcatctataataattgacttacctgaacccgtttcaccacttaaaacagttaaaccatcagaaaattgaatttctaactcttcaataatagcaaattgcttgattgataaggtttgtaacataaactcatcgcatccttataacaaattgaaaattcttgacttgatttcatcacttgcctctttgcttcgacaaataattaaacaagtatcatcaccacaaattgtgcctagtacttcttcccaattgatttggtctaatatagctccaatagattgtgcattaccaggtaatgtttttagaacaagtaaattatcagtaccatctatattaacaaaggaatccattaaataacgtcccaatttttctaaaggatggaattttctatcgtttggtaaactataaacatattgacctgaaggtataggtactttaataagttgtagttctttaatatcacgagaaacagttgcttgagtgacatttaaatcataatcgtttaatcgtttaactaattcatcttgtgtctctatctgttcatttgaaataatttctctaatttttatatgcctaaccgattttttgggcacagtaaacacctctgattacgaatatttatacatttattttaacacatgcactgatttacgactactaaacacctttacgtaaaaagggtaaacatggtttatctatcttggttatctatttataaatatttttcatattacgcataacaattgcttaaaatatgtataaaaatgaatatatgtgtaataaacttgctaattattagatttaataagcgtcaattgtttgaacatatttaattaaaatcacattgatatcacagatgcgaatattgtcgtatagaaattgaaaattctatttttagatgaaagtctttaacataattttaagtttcaacatgagaaaaatcgattaacaaacaacgtcagttgaatatgccttttgagacatttcaaacttaacaattgttgctaatcgatatatttgcttttagtgatccctgctataaaataaatcaacgatttctaataagtgttttgtattgaattgttcatcaatttgcattagttcatccactgctgcgtctctatgataagtcaatttatcttctgcgccatcttttcctaataaactcacgtatgtacttttattattttcaagatcgctgcccacttttttacctaacttcgcttcatcaccatagcagtctaataaatcatctttaatctgaaacatcatacctaaatgataactataactttctaaatgttctttagttgcatcatcgacattagcgatatctgctgcactcataaccgcaaaagttaatagtgctcctgtttttgttttgtgtatcatttccaaagtttcaagattaattggttggccttcgctttgcatatctaacatttgaccgccaaccattccaacatgaccacttgctattgacagccgttgtagaacttttatttttacttcatcagttaatctatcatcacttgaaataagttcaaatgctttagttaataaagcatcacctgctaatatcgccgtccactcaccatatactttatgatttgttaatttacctcgtcgataatcatcattatccatcgctggtaagtcatcatgaataagtgaatatgtatgaatcatttctagtgcaattgcgctcttcatacctaactcatactcggtatttagtgaatctaaagtgagtaataacagaactggtcggatgcgtttacctccagcatttaatgaatacaacatactttcttctagctgagtatccattactgatttatttatcgcaaccgataattcattattgacttcatctattaatttattcatcggtagattcgtcattttttacatcctcagcttcttcttttattaagtcattcacctttttttcggcattttttaaagttgtgtcacaagctgctgatagtttcataccacgttgatataaatctaatgattcctctaaagatactgtttcattatctaatttttgaacaatttgctctaattcttgcatcatttcttcaaaactttgcgtttctttagtcattattacaccttactttcgtaacttttgcatctactaagccatctttcattgttaacgtcaattgatcattttctgttaaatctttagtactcgtaatgacttcgtcttttttattaacaattgcatatccacgcaacattgtattagttggacttaaattgtttaagttttctactttatttttcaaatcatttttataacttaatatcttagaattcaataatttaacaagttggtttgtcaattgaagattattttgttgttcttgattaacactacttagtaacgcttttaaattatagcgttgttgcaacagcattaatcgatgtctctgttgttcaaaagttgcctgaatttgttgtttcagtctcttttctaaatcatctcgacgttgtatctgttgatcatacaataaagttggttgtttaaacttgtaatacgatgacaaatgttcaacatgtttacgttgttgttctaaatgtttcttgatgaaacgagtcaatgtaaactgatattgctgtatttgttgcagcaattcatattggtctggtgttgcaataacagcagcttgagttggagtcgccgctctgatgtctgcagcaaaatcacttaatgtaaagtctgtttcatgacctactgctgatataatcggtgtcttacaattatatattgcacggacgacagcttcttcgttgaaattccataaatcttcaatggatccaccgcctcgacctacaatgatggtatctacacctaaactatctgcatattcaattttttcaataatgtcgtcttttgctttttcaccttgaaccaaagtactaatttgtatttgttcagctaatggaaaacgactatttatcgttgaatggatatctcgaattgcggcacctgtactcgctgttaaaactgcaatttttttaggaaacttaggtattgatttcttattcgcattatcaaaacaaccttcttcagttaattttttctttaatgcttctaatttttgatataagttccctataccatctaattgcattttatttacataaatttgatagtttccacgacgttcaaaaacagaaacacgtgcttctaataagacctcatctccttctttaggttcgaagtttaatttagaagcactacctttgaacatcatggcacttataacgctttctttatctttcacattaaagtataaatgaccacttgaatgctttttgaaatttgaaagctcacctttaatcaatacagattggagatgtgggtcttgatcaaatttatatttaatatatttcgttaaagctgaaacacttaaataatctgacatataacatcactcaattttatttttttatattactcaatacaccatttataaatttataatgatcatcatcactgaattgttttgttaattcaactgcttcattcattacgactttagcaggtgtatcactgtgtaatatttcatatgttgccattcttaaaataatacgatctgtttttaataaacgtgcaatagtccaatcttttaaataaggactaattgtctcgtctaatacaggttcgtgatctttaacgccagaaactagccaatgaataaattcgaagtctaaatctggattatcgtctttaataaagcttatcgcttcatttatcgttaaatcactgtccttcatttctaattgaaataaagtttgaaaagcttgcactcgggattctttacgactcatttttaactccttcaaacgtttgtatttttctttatttaattactgaattaggtatgacattacttttcaataacgatttgtgtaatgtgaatattaatttgcttaggttctatcgctgtcatattagaaattgaattaaaaattgacgtttgaattttgtttgcagtttttgaaatattaacaccatgttttaatgcacaatatacatctatatatatgccatcttctttactctcgatttttaaatcacggcttaaatttttacgactaactttttctaaatttgtttcttttaattcagcaaaatggccagtgatgccttcgacttccgaagtagctatacttgcaataacagatagcacttctggcgctatttctactttacctaattttgaatttgaataatcagttactttgaccatggattgacctcctattaacattcatcattcataatgctattttgctctaaaaagtttgtattaaatttaccgcttctaaatatatcgttattcaataatttaatatggaatggaatagttgtatcaataccaagaaccacaaattcacttaatgcacgaatgccagccataatcgcttcatctcgtgtcggttcatgtatgattaatttcgcaaccatcgaatcataatatggcggtatcgtataattagtataacatgctgactctattcgaacaccatatccacctggtgcaagatattgctcaattttacctggtgatggcataaagttcttgtaaggattttcagcattaattctaaattcaattgcgtgtcctgttaatttaatatcttcttgtttatacggtaacacgtcacccatagcaacttgtaattgtaatttaactaaatcaattcctgttaccatttcagttacaggatgttctacttgaatacgtgtattcatttccataaaataaaatttattatcatttaaatcatatataaactcaattgttcccgcattttcataatttacagctttcgctgcatgaactgcggcatttcccatttcacgacgtgtttcgtcatctaaaattggggaaggtgcttcttccactaatttctgcatacgtctttgaattgtacaatcacgttctcctaaatgaattacattaccatagctgtccccaacaatttggatttcaatatggcggaagttttcgatgaatttctccatataaagtccaccattaccaaatgcagtttgtgcttcttgttctgtcattcggaagccagtttcaagttctttttcatcacgagcaacacggataccttttccaccaccaccagcagtagctttaatgatgaccggatagccaattttcttagcgattttcttagcttctgagacgtctttcattaaaccatcactaccaggaacaactggaacattggctttgatcatttctgccttagcaacatctttgatacccattttttggatagattgataacttggtccaatgaacttcaattggcatgcttcgcataattctgcaaagtcagcattttcagctaaaaagccataacccggatgaacgccatcacaacctgtagaagttgcaatagataagatattcggaatatttaaatatgaatctttagacaaagtgggacctacgcaatatgcttcatcagcaatttgagtatgtagcgcatctttatccccttcagaatagattgcaacagtttggatgcctaaatcacgacaagcgcgaataatcctaactgcgatttcaccgcggtttgcaattaaaacctttttcattatttcaccttaaataacggttggccatactctaccatttgtccgtcttctactaagatttcaacaatttcacctgaaatttctgcttgaatttcattaaatagtttcattgcctctaaaatacacactgttgtttcatttgaaacagtgtccccaacttgaacatacgcttcttcatctggagatggcgatttgtaaaatgtacctaccataggtgcattaattgttttgtgattatctgaagttggctttggagcttcagttttattgctatcagttgattgtacttgaggcataggcattgccgcagcttcaactggcatttgtgagatttgtggcgtgataatctcagtttctttttctttcttaagcgtcactttgcctttagtatcttcaatattgatttccgttaaagttgatttatccagaatttcaattaattctttgatttctttaaagttcattattactgactccttcagtttgttttcatctacccgtctattttacttgagacaactcttcaattcaagcatgttcatatcgcaggcgacattataagtctatcccaaagttataataaaaccacattttaaattaaaaacacttgtggatttattacttaacattgactcatcttaactcttgattaaaaattttatgctttcagttaaacatatcaatgttatttttatttgctattatttcttatcctcatcaatatgatatgtagatatatacccttactcatgtctatgtttttttactaccaattagacgattcgttttatattttaaaatttattttaaaaataaaaagcctcatatcagcatataacctataatcattttaggcaatagctttatgagacttatttggaatatcttacgttaaatcagtatagtgaatataagctatttgttaacaaattagagattatcctcttgaaatgtagcttccatcaccagtgttgataattaaaacgtcaccttcgtttacaaataaaggtacatttaatgtataaccagtttcaacagttgccgatttagtagcaccagttgcagtatcacctttaataccaggttctgtttcagttactgtcaattcaacagttttaggtaattcaacaccgatagtttcaccttcgtatgtttgaatttgtacttccataccttcttttaagtaattcaattcttcttttaagtaatcacttgaaagttctgtttgttcaaagctttcattatccataaatacatgattatctccgtcagcatataaatattgcatgcgacgattttcaatcattgctggttcaactttttcaccagctctaaacgttttctcttgaattgcaccagttcttaaattacgtaattttgaacgaacgaatgctgaacctttaccaggctttacatgttggaagtctataactttccaaatagcgttatcaacagaaattgttaaacctgttttaaaatcattaaccgaaatcattcagtttcctcctcattttacacgcttatgttaaaactataaggtcttttgtgcatttagtaaagacttgacaaccattttctgtaattaaaatatcatcttctattcttataccgcccaaaccttctatataaacaccaggttctactgtaacacagttgttaacttgaagtttatcttgtatcgtacgagccagcattggcccttcatggatttctaaaccaataccatgtcctagtgaatgtccaaattcttttccatacccttttgactctaaatagtttcttgaaatggcatcagcttctgcaccagtcatgccaggtctaatctcattaattgctttcatttgagattcaagtactatttgatatatttctttcagtttaggatctggttctccaatagcaaatgttctagtaatatctgaacaatagccgttataatacgcgccaaaatctaatgtaatcatgtcgcctttttcgataactttgtcacttgcaacaccatgtggtaatgcacctctatgaccagatgctacaatcgtatcgaatgatggtccatctgctcctaattctagcattttactttctaatattgcctttaattctttttcggtcatacctgcttttacaacagttaaaatatattcatatgtttcatcaacaatattagctgctttttgaattaaagcaatttcgtcagcatctttgacgtctctaattttatctacagtattagaaatgcttattaatgatatacggcttttatttaattcaaggtatgtatcataacttacatggtgcccctcaaaacctacattttcaaaattttcttggtgtagcaattctttaatctcaccaataatagtagatttacgattaataatttcataatttggcgcctgcttagttgcttgatcaatatatctaaagtctgttatcaaatattgtttatctttagatatgataagtgctccactggtaccagtaaaacctgataaatatcttctattgtaatccgaaagaatgataatcgcatctaaatgtttttgttttaaaatacgatgcacttgtgttattctgctcatcttattacctcctagtgaaacgtttgtgcatttcaactttatacattaaaataatatcataataaggataaaaaataatagatattgattttagggagatagtaatgaaaaaattggtttcaattgttggcgcaacattattgttagctggatgtggatcacaaaatttagcaccattagaagaaaaaacaacagatttaagagaagataatcatcaactcaaactagatattcaagaacttaatcaacaaattagtgattctaaatctaaaattaaagggcttgaaaaggataaagaaaacagtaaaaaaactgcatctaataatacgaaaattaaattgatgaatgttacatcaacatactacgacaaagttgctaaagctttgaaatcctataacgatattgagaaggatgtaagtaaaaacaaaggcgataagaatgttcaatcgaaattaaatcaaatttctaatgatattcaaagtgctcacacttcatacaaagatgcaatcgatggtttatcacttagtgatgatgataaaaaaacgtctaaaaatatcgataaattaaactctgatttgaatcatgcatttgatgatattaaaaatggctatcaaaataaagataaaaaacaacttacaaaaggacaacaagcgttgtcaaaattaaacttaaatgcaaaatcatgataggagtcttttaatgcgtaatataatattttaccttgtacttattattgctgcgattggattagtaatgaatctagatgcctttattttttcaatcgtcagaatgttagtcagctttgcagtaatagctggtattatttatctgatttattatttcttcatcttgactgaagaccaacgcaaatatcgcaaagcaatgcgtaagtataaaagaaatcaaagaagaaaatagacaaaaaaatggaagcacttgtagttaaaatagtctacgtgcttccattttttattctaaaaactactttctaaacatccattcatctgaacgatatttttcagttaattcttccacttctgccaattgagcttctgttaattcaagtggctttaattctatatttaaacctttcttaaaacctttctcgaaagcttcttccatttgactaatagtaatgtgttcatctgaaatatcattgatggcaactgctttttcaacgaatgcctctttcatttttaattttaatctttcatttttataaataaacatatcaaacaattcatcaatatcaatatcttgtaaaattgaaccgtgttggaggattacgcccttttgtctcgtttgagcactcccagcaatcttacggccttcaacaactagctcataccaacttggtgcatcaaaacacactgaacttcgaggttgttttaatttttgacgctcttcaggcgttttaggtaccgcaaaataagtatcaaatcctaagtttttaaatccttctaataatccttgtgaaatcactctgtacgcttctgtaacagtagaaggcatattgggatgcgattcaggcactatcacactgtaagttagctctttatcatgaagcaccccacggccaccagtttgacgccttacgagaccaaaacctttctctttaaccttatcaatatcaatttctttttgtagcctttggaaataacctattgataatgttgcaggattccatgtgtaaaaacgtataactggatcaatttcacctctagagacaaaatttaataacgcttcatccattgccatattataatatgggtctttacttcctgtattaataaaattccaagtttcagtcatattcaagaactcctatcagcaaaatgtataatatttgattcgctaattaatcaatttaactaaatgaataataattgcaattctttagtgaaatattttgataatttgacctaacagtcttataattatattatcgtttaattagggaggatgcaagatgagtgctagtttgtacatcgcaataattttagttatagcaattattgcttatatgattgttcaacaaattcttaacaagcgagctgttaaagaattagatcaaaatgaattccataatgggattagaaaagctcaagtcatcgatgttagagagaaagttgactatgactacggtcacattaatggatctcgcaatattcctatgacaatgttcaggcaacgattccaaggattaagaaaagaccaaccggtatacttatgtgatgccaatgggattgctagctatagagccgctcgtattttgaaaaagaatggatatacagatatctatatgttaaaaggcggctataaaaaatggactggaaaaataaagtctaaaaaatagttttgtaaatttaatatacgatttaataaaatctgagtgttaattgatcatcaataacaatactcagattttaattttttaacaaagactgttactatatttctctagcttcacagatcattaaatttagtttctgcataataaagaaagttcaactcattttcaatacgattcaattacctcaatctaaaaagtgaaaagacaatttctatgaaagaatcctgccaaaccctaagagttattacttcggtttagttttcttgttcaaatagaaattgtcttttttaattgattttgaaaccattatccttaaatcttcatacaaagttagaataataattctcagaaaatgtgtttaatatcttatttttcctttttaagattttcaaactttaatattggtttacgagcagctgtagcttcgtctaatcgatcaatcacagttgtatgtggtgcttctaacactttatcaggatcatttttagcttcttcagcaatactaattaatgtatcgatgaaataatcaagtgtttcttttgactctgtctcagtcggttcaatcatcataccttcttcaacatttaatgggaagtagattgttggtggatgtacaccgaaatctaataatcgcttagccatgtctaaagtacgtacaccaaattctttttgacgcacaccacttaacacaaactcgtgtttacaatattgtttataaggtatttcaaagtgttcagataaacgtgctttaatataattcgcattaagaaccgctgcttcagaaacctctttaagtccagttgctcccatagttcgaatatacgtataagctcttaagtaaataccaaagttaccataaaatggttttacacgtccgatagaatttttaatgtcattatcatatttaaatttgtcgccatctttaataaccattggctttggtaagtaacttgctagttcttttactacaccgactggacctgaaccaggaccgccgccaccatgtggaccagtaaaggttttatgcaagtttaaatgaacagcatcaaatcccatatctcctggacgaactttgtccataatagcgtttaaattcgcaccatcataatataatagaccaccagcattatggacgatttcacggatttccataatgtttttttcgaaaatacctaaagtgtttggattggttaacataatagctgctgtattttcatttacaacacgtttcaagtcatcaatatcaacttcaccacgttcgtttgattttacagtaactgatttaaatcctgcaaatgaagctgaggctggattcgtaccatgcgcagaatctggcacaatgacttcatcacgatgaccttcaccattattctcatgataagctttaaatatcatcaatgcagtccattcaccatgtgcaccagcagcaggttgtaatgttacctcatccataccagtaatttcttttaattcttcttgcaaactgtaaataatttctaatgaaccttgaacttggtcttcatcttgtaatggatgtgattcactgaatcctggtattctagcaaccttttcattaattttagggttatatttcatcgtacatgaacccaatggataaaatccgttatctacaccgaaatttttatttgaaagttcagtataatgacgtactaagtctagttcagcaacttcaggaaactccgctttgtttttacgaataaatttatcatctaacaatgactcaacagaatttgttttaatatcacttattggtaatgaatatgcatatctgccttcacgagatctttcaaaaattaatggacttgatttactagtcatttaactcaccagccttttctacaaatgtatcgatttcatcctttgttcttaattcagttacagctattaacatgtgatttttaaagtcgtctgaaacaacgcctaaatcaaaaccaccgataatattgtacttaactaattcctcgttaacttgttgaattggtttgtcaaatttgactacaaactcattgaaagatgtaccatctaatacttcaaaaccttttttaataaattgttgtttagcatagttagcatgttctatattttgaactgcaatatcatagataccttgtttaccaagtgctgacattgcaattgatgacgctagggcatttaatgcttggttagaacaaatattagatgtcgctttatcgcgtcgaatatgttgttcacgtgcttgtaatgttaatacaaagcctcgattaccttcatcatcttgtgtttgaccgactaatctacctggtactttacgcattaactttttagtcgttgcaaaatatccacaatgtggcccaccgaattgagcaggaattccaaatggctgagtatcacctacaacaatatctgcaccaaatgaacctggaggtgtaagtaatcccaatgctaatggatttgcatatacgataaataatgcttttttatcttcaataaagctatgaatcttttcaagatcttcaattgaaccgtagaagtttggatattgaactgcaacagcggctgtttcatcatccactgctgcttctaattttttcaaatctgtaacagtgccatctaaatcgatttccacaacttcgaattccttacgcgtcttagcataagtatgaagtacttgtaatgcttgataatgtaaaccttttgagactacaattttatttttctttgtttgactaaatgctaaaatacatgcttcagcaaagctagtcatcccatcatacatagaagaatttgctacatccatatctgttaattcacaaattaaagtttggaactcaaaaatggcttgtaattcaccttgagaaatttccggttgatatggcgtatatgctgtgtaaaattctgatcttgaaatcatagcatccacaactgatggcgcgtaatgatcataaacaccagcacccaaaaatgatgtatgcgtttctttagtgatattcttgcttgcaatgcgatttaatcttctaagtaacgttgtttccgcttcgctttcagcaatatttaaatctctatttaataaaatgtcacttggtacatcaccgaataattctcctatagattttgcaccaattgtttgtaacatttcttgcttgtctttttcagttaaaggtatataacgatgactcacaatgcacacccctttttaattatttatcaatttgatttttcttaacaattttcgcttttaattgacgcttacgaacttgaacaagcaactctctacccatttcaaactcatctctttttatcattgcaagtgcaattgatttacctgatgatggagactgtgttcctgaagttacttttccaataatatttccatctaaatccataacttcataaccagttcttgcaattcctttttcaagtaattctaatcctactgttcttcttggtgcaccattttctttttgatcttttaatacagatttaccaataaaatcagcatcaattaatggtttacttgcaaaagcgataccaccttcatatggcgtaattgattcagttaaatcttgtccatgtaatggcaatccagcctctaatcttaatgtatcacgagcgcctaacccacatggcataacattatactctaataaaccatcccaaattttttcagcatcatcgatattacaataaatttcaaacccatcttcacctgtgtaacctgactgagataaaatgacgtttgctccaaataatttgacatcctgtttaaattcaaacattttcatttcagttacatcttcatcaactaattgattaattaaatctctagcttttggtccttgtattgctaattgaccatattgatttgatacattttgtacttcaacatcaaatttctctttgtgttttaaaatccaattaaaatctttttcagtattagcagcattaacaactaataaataattgtcgtcagctaatttatatattactaaatcatcaataataccgccttcttcattacataaagcagtatataatgcttttgaagtagttaaattatcagtatcatttgataataaatattgcacaaactgactagcatctttacctgtcacttcaatttcacccatatgactaacatcaaacaggccaatttcgtatcgaacagcattatgctcctctttaatacttgaaaattgaacaggcatcgcccatcctccgaattccacaatttttgcacctctatcaacataattttgatataaaggtgtttgttttaaatcacttgacattgaaatacccccttaaaattataaaaacaggatagcaatcgctaccctgtttataaatcaccaattcaggaacgcgttacagtattatccttttgcctgagagtttcgtaataaattacttgcaccttcggcgatagagtcttaacgctctattctctctaatactgatcactcgcttttattaaatttagcaattcataatatatttctgaaattgatagcaaatgactatcaaatttcttgaatgcgatttcattatatcttaaaattcgcgagcaatacaagtcatttaactgcttgattgtcttattatttgcattaggtcgatgtgggtcatcattgattcgactatatataatatcaatattacaatctaaccaaataatgtttttttgatttttcaaaaaattaaatgcctcttcactttcaataataccaccaccagtagcaattatatctgcagtgttaatacattcttgcaaacatgtaaactctaaattcctgaaatattgttcaccatgtttactaaatatttctggtattgttaacttatacttctcttcgatatatgaatctatatcaataaatgataaattttgctcatctgcaacgtatttaccaatcgtagatttaccggtacccatgaaaccaattaaaattattggtgatttatcatgattcatgcgttttcccttctttcaataacaaaacaatcttatagttatagtcagtttcaatattatataatgtctttaattttaaactatattgactgatataaaaagtgaaaatggaaaaataaattgctgttagcatcaataagaacggagttacatatcctttttctttatataaatcaaaattaataaattatttcacgtcctttttaatagtactcatttaaattctagtaagttatacataaattgttttagtctgcagatttgtaccgactttaactgttatcgttattttaataatagatttatagtagatatttgcagtaaatgctgtaacattattaatcattgttatatttcctctgtcatttacaactttaataattttattatttattaatttgtattcgatcatttcttcacctttatgtaaaatgatacgctgttgcctaatttcaatatcgtttttatctacacctttaaaatcctctagaatatctcttgagaaaaattcgaaatctacagttgttaattccctactttcaattagaaaagttttgctaagtctaattaagtctggaacaattagtaaagttatacttataaccatcatcgctactaacatttcaataagcgaaaaagctttgacattaatactgtatacatgtcttttgataagaagtggtattttttgaaatggcacatatttgttggtcactttgcttaatatcatatttccctatagttacccccttcttaagttcttctttattaattttagatacagtcgtcaaaattactttagaagcatcaattgtttgtagtttatggtttatactcgcttgcatttgattcatcattggtatcaatagtaatgtaatcaatccaattagcaaaaatccagccatactatctattaagaatgatcctttacacttatagcttttcataacgaattcttcctttttcaatatggaatattattctataaattgaattgttattgtcaattgttatgctaccaaatttattgatattcccttttttatcaaaggcaataatgtcaacttttgcaacattaattattttgcctacttttaattttagaaatcgtattttattattctctattactttaatagtgtcactgttttcataaaatctaacattgatatatccttgatttgctatagcttgcgatttaatataattcaattcagtaataagagaaatgatatttgcctcatcatctattactctaagattgcttaatcctttagatgtcattgtcaaaagtaaaaatatactgattaacatcattaccacaagcatctcaatcatagtaaatgctgactgctttctaatttgcaactgcttctccattactaattgttattgactctcctgatttacatgtcttttgtgcttcttttataaaaccatctgcaattaagtcttcaatagacgatggatttctattatgtttcaatgcatacgcttcaatttgactattaaccatttttacctgtgcattacaacctgttgattgtatgtgagcagtttgtttagcaatatttggaatgattaaaattaataataaactgatgattaataacactaatagcatctctatcaatgtaaacgcttgagttttctttagaaatttaaacatatattaacctccattattttatactttgcatcatttgaaacattggtaacataattactaaataaattgcgacaataaataaacctaaaatcaaaaataaaataggctgtaaaaactgagtctgttttatcgctttatcctctatttgcctcactaatatttgcgaatatagctttagttctacttctagctttcctctcttttcaccttgtagcacaaacttaattaattgaggcttaaagcattttagtttttctaaaatttgaggtaaaccatatcccatttctgaataagttaataagtatttacctagaaactgtctaaatggatcactactatggttaatataaacgtctactattgattgaagtgtaataccatttttataaaacaacactaattcattagttacaaaataagttttaaataattggaaatagcccgatattagcggtagtttcatcacaaagtttatcttattgagcatatttaatttgttataaattaatttcataataatagccaacatagatactattatgagcattactacaattatagtaggtaagctagtaatgaaaaaagacaatgttttttgaaaagaagatagttgaatattcatagaagtatataattgttgaaactgtggaattactgtgaagtttaatattataatcatagcaataaaaatagagactagtattaaggggtattgcagtgtctttaacaatcgttgttctgactttctattcactttcatataatttacggtttcttctagaacgtctatgatattgccaaatctttctgccaaatatacttgcatgacgatagtatcgctataacctatcagtgataatatctggttgcatggtgcaccatttgaaatttcacttagaatggtgatgcctaattgcttatttttatatgtcatttgaagatttaaaaattgaaaactttgatacagagtgaaaccatatttcaacaaattacataaatttgaaagtaaatcgatttgttgggccttacttaattgtcgcttcttagaatgtagtttaaatgtatttatccattgtagtttcacaaatgacacctgcttttgtcatatcatcaagtttatcttctaagttcttaaatgatgatggtaatgaatgattatgggaaaagaaatatcggagttgttgctgagatagaatttcacatactaattgtcgctgttgcttaatagtagttacaagtcgttggtttataattaagttagttacctgtatcaattcttgtacagaaatgcccatttctaatagccttaaaatagcacctttacaatcagttgcatgcaatgtagtcagaacaaggtgaccacttaaactagcctgtataacacacttggcaacatctttatctctgatttcacctattaaaataacatcaggatcacatcttaaaatagctttaaacgaatttacatagttaatgccagctttatcattcacattaatttggacaataccaggaatttgcatctctacaggatcctctatagaaattacatttaaattcaaggctttattcgcgtatgagaccatttgatacattaatgtactctttcctgaaccagttggtccactaaacaatagtaatccttgtttcttattcatgaggtgtttaaaatcattgaatttataagttgatttctgttgttgaaaaaattgaggtacaattctgatcacacaactttcttggccaagtgacaatggtaaagttgatattctcaaaaaatatattttattgaaatggtaactatatcgaccgctctgtgcgacttgttgtgtagatacatcaagtccagcttgaaacttcatataaactaataacttttgataaatgctattcccaatttgttcatactgctccaagttatcattaattctaaatttaatacttacttcatttttaaccggaataaaatgtacatcactcgctttcatttctatcgctttattaattatttcttgaaatagaatcttcaaaaaaacacctcctacatataatcacgtaggaggtgtttttattacttcaatttaaccgtgtaaaaatggatttaattgttcatcatcaaccgtcgtatatggaccatgtccagggaataaaggtaaatcgccttctaattcaaatattttatcttgaatagaatcaactaacgtttcataatcacctttatataaatctgtacgtccgattccattattaaataatgtatctccaacaactgcgaattcatcgaacacatatgttaaacttcctggtgaatgtccaggtgtgtgtaacacattaaacttaaatccttctatttctgcgctaccttcgtttaacttttcaggagttaccttacttgtaataattggtagcccatattgcttaaatttatctgccccatttttaacgggatcttttagaaaatcaaactctgcttcatgcatataaaccgggacatcgaatcgattgactatatcatcgactgctccgatatgatcaaagtgtgcatgtgttaataaaatagcttttaacggtttatttatttggtttaattttttaataattttttcactttcacctgaagggtcaatcagaataacagctttgtcattttcgatgaaatacgtattggtatcaactaagcctaaagttaagcttgaaatcctcataggttttcaccactattttctaaatgtttttgtactgatgttagtttatcattcatttttctagatttgtctcgtcggtcatctatacgaatatttgtacaaactctacttaaacctttatcaaaaggtaattcatgtatcacttgcacaacttctaatacatcgcttaattccccttcaattagagtattcattggtgttaattgaaaatcaattttacccatcgctttatattcttgaagttttttctgaatatctgcaatatatttactaacgctcggaccttcagttccaactggaataacaaccacatcaacaatagccattattttaccccctctttatctaatacataggtcttgattaatcctgctgctcctgtaatacctgcatcattacctaatttcgcttgtacaatttcagtttcaaattgagcaggtgtaaatgttaaattatgatattccgttttaatattttcaattaaaataggtcctgcagtagacattcctccacctagaacgatatatttcggattacttgtaacactaataatactacataaatatccaatatagtttgcaaccttttcagtaatgaaaatacagaattggtcaccagcttttgccgcatcaaaaacagcttttgctgtaactttattttctttaatcaattctaatatagaagatctaaacgtcaacttcggatagtagaagttgactaagttaacaacgcctgtcgctgaagcaactgtttcaatacatccagaacgaccacaattacatttaaatcgttgatcgaagtctgctctaaaatgacctatttctgcgccagagccattatgaccatgtacgatttcaccatttgaaataattcctccacctagtcctgtaccaagtgtgatggcaacaacatcatcggcaccttcaccagcacctttgtgtttctcccctaaagcagctatgttagcatcattatctacatacactggacaatcaacgaattgttcaaaaatctcacgtacattaactttttctggccaatataagtttactgctccatttactgtacctttttcaaagtcaacaggacctggtacaccaatacctacgccaagtatatttgaaaaattataattattttcatttactttttcaacaaacgaatcataaattcctttcaaaagtgtatatcctgtactatcagatgtatcagtgtgaatagaccatttatgtaattgttctaattcaggtgtgaaaatacctaatttacaagtcgtcccgcctacatcagctgctaaaataatttttgtcatttctgttcattccttctctgattaattatcaacgtacatttcaaatattcttccttagataacagttcatattgatacaatgatgaaatctcctgttgaatcatttcgtacatatcttctggatttttaaaatatattagaaatccgtaacttttcaataactgttgtacatcataaaagttatttatttttcgactcatttgatttagtcaactctttttctaagttaatataatctgtatttttagggtctgcatttaatgctttacgcacatattttaatgctttttcatcatcatttaatgaacgatttgctatcgctaactcaaaatttaataaacctgatttaggaaacattctaagtcctcgctcccattctgtcataccttcagacttagaattgatagtagccataatcataccacttaaataatatgtttgatcatcggcataatttttatttattgtctgcttcacaatattttgagcattatcataattaccactagtcatatcatctttgatcaatttattataaatattatcttctttaattgtaaaaattctaatttgaagtgcaataaatataacaagcataccaattagtaaaatccaaaaaatattacgattcactttatagtaatagccaattaaagttattaataaaccaccaatgaatcctccaatatgcgccacaatatttatatttgacataaacagagaaacaccaactaatatcactaatgcaattaataactgtcctaacatttttttgttaaatgttttcgaaacatacatcatcgcaaaaattgatccaatcagaccaaatatagcaccactagccccaactgaaattgtagtcgtattaaatgatagtgatacaaagtttccaaacagccctgcaataaagtatacagttaacatcctccatgaaccaataattgcttcgactattttaccaaaaataaataatgaaagcatattcataagtatatgttcaaaactaaaatgtaaaaacatcgatgtaacaattcgataccattcaccatgtacgacattaaaatgcactaacccgccaacatctaataattttacatccgaaaaattatttaaatataaaatcatacataaccatattaagacatttacaaatattattgtgtatgttgccggtgaaaatttctgcatatatttatctaaaaagttatcggttaatactttgcgtttatagaacatatatgtctttttatcattattttctgaaataagtctagccaaaaatatattcggcatatgctttatcagatcttttgtgtgtcttataacattgaatttaattctaattggcgaaacttcatttaattgttcttctgaaaattccgattctgtaaaataataaaattcaaaactttgaggttcgaaagaaataaaatttgctatttcatctttgtgttcaagcactttcgctttgtcaaaacgtatttcttgggtagacttgatatgttgtttaaaaatgactacttgtttttttcttttatgggctaaccaaatttcttggtcatctttttccctactgacaatatcaaaattcaagtacctaatccaataatatattgttttccaaaattgtttgtctatgttcatttagtcctccactatgctgattgatatataatcaatttatcgactggttgatcgaatgattccggttcaaatgatgttatttgaaaatcgtataataagcttattgtctttgtctgataattagctaaaaacctgtcataatagccaccaccatacccaattctatatccatcgtcttgaaaaccaacaccaggaacaacaattaaatctaggttattcgttgtttcaccttttgaagttggatagtaaatccccttattatcgacatcaatatcttttagattaaatatctctttaaaagtcatttgatgatttaaataatccattttcggcacaaaaatacgtttatgatccattaaggcttgttcaataatagaaaaagtatctacttcatgattaaaagaaagaactagcgcaattgtgtttgcttctttgtattcttcagttgcaaaaaattgatttcttaaccatgtgtctgcttttcgcttttcagctttattaaaattcttcattttatgtaaaatgtattttctaatctcatttttagtcacattatcacccactttattcaattctattatatcgttaataacaatacatgtcattatgttgtcatgatgaattatgcgacaattctaaaatttattatttcaattgaaaatcttttatcatttcatacgtgtgaataattaaaaaggtgaaacctcttattttgagatttcaccttttttattgttaatttgaatttaattttaatgattattttgtttcacggtgtaaagtttgtttgttttcacgtgaacagaatttcttcatttcaacacgttctggattatttcttttgttcttagttgtaatgtagtttctgtcaccacattccgtacaagctaaagttacgtttacgcgcatggttattcctccttatcatttctaaatacgactttattattataccaacatctataatatttgcaaagttaaaattttacaaccatgcgctacacaatcgtcaggctaaattttatttgtctttgtctttatttttatcatctttacctaactgcttaaagtagtagttaattacatctctacctaagtctccacctgttaaccatggtggtggtacaggctgatttgtatatacaattgaaaacgctaattttggatcatcaattggcgcgtatcctatataagtagagttaactcttggctctccgttttgaaacacttcagcggtacccgttttaccagcagtaggtactactgtatctttaaaactaacatatccagtaccatctttttcattaaatgccattttgaatccttcttgaatttgtttgatttctttttcagtattattaaccttgttcaagacggtgccattaattttcttcttgagtggaccaacctcatctttattagttgattcatgaatcgttaatccaatgtgtggctgtattctataaccatcattcgctatagttgaaacatattgtgataattgtaatggtgtataggtatcatattgaccaattgataaatctagataattacctggattatttgttaatggttcgatttgacctcttgtttcatttggtaaatctatacccgttttcacacctaatcctacttgatttaatcctcttcttagcttttgggcaggtgaacttatatctgaaggtaaagccataccagaataataagggtctcccgctaattttaatgctgttttaaacatatatacgtttgatgaatgcatcaaagcttgcttatcattaatagatacatgcccgtttttattaaagtatgatcgttttgtcaaaccaccttggaaatgtaatggttcatcgaccattgtttctccaactttgatagctttattctgataaccagctaataatgttccaccttttacagaagatccaaccgcaaattgagaagtaaacgtaccaatgtcataatcagtcactttaccactcttattaatctgctttccggcaagcgcaagaatgtctccatttttaggattttgtacaaccatcattgcattatccatatctttggcaccttggcttcgaagcttcttaatttgtttatctaataatgcttctacttctttttgaagatctatatcgatcgttaatttcaaatcttgaccgcgagcgccaggatttaacacttctgaagatgtgactttaccagatttgtccgttgtgtatttcatttctttcttcttaccacgcaatacatcttcatattgatattctaggtaagattttccaacacgatcattgcgtgaatatcctttggataagtaatgttctgtcaattcttttggaataccttcagcaggtgtcgatacatctccgaatatacctcttaaagtgtcgccatatggatattttctatcccaatccatagccgtgttaacacctggtaatttggaaagttgctgagaaactgctgcatactctttttcactgacatcttcattttttatcatttgtggatctaaaactgttcctgcattcatctctcgaaaaatggctaaaacttgtaaatctttagaagacaattcatctaattgtgattttccaattttcgataacagttgtttatcatattgatcttgtttaatacttccatctgctaacatagcttgttcttttgtcatcattgcttttgcttttttaggatgcaactgaatccagaaatctttcttatcacgttctgtaatcttcttagtatccatcttgattagcttcgataacttttcagccgtatccaacatttccgattgtgttgtttttcgacccctagtatatgtaatagccattttagaagcattatcaactaaaactttcccatttctgtctaaaatacgacctcttggcacagactcattcactgtaatgttttcatcattttttataatttgtttataatgtgagccttgtgcgatttgtaaataacctaaacgtagtactagtactgcaaaaataaatacaatcacaccaaatataaagttaattctcttgttaattgtattttgaacgatttcatcatttgatttttcttttagtctttttaacaaaactacctacctctattcaaagtctttcactttaaatcatatatgaatttagaaattatttctatctttttgacaaaaaaataacggtctcatttaagagaccggacaagtaatcatactttattttgttgcgttatataattcgtcaactttttcccagttaactacattccaaaatgcgccaatgtagtcagggcgtttgttttgatattttaggtaataagcgtgttcccatacgtctaaacctaaaataggtgttttaccctcagttaatggattatcttggtttggtgtagtcacaatttctaactggccattgtttacgactaaccaagcccatcctgaaccaaagcgtgcagctgctttgtcagcaaattcttttttaaattcttctaaagaaccccattgttctttaattttttctactacagtacctttttcttctgagtttggtgaaagtaactcccagaataatgaatggtttaaatgtccaccgccattattacgtacagcagtttggatgttagctggtacactgtctaaattagcaacaatttcttcaatagatttagattctaaatctgtaccttctactgcagcatttaatttcgtaacataagtgttatgatgtctgtcatggtgaatttccatagtttctttgtcaaaatgtggttctaatgcatcaaatgcgtatggtaattttggtaattcaaaagccataaataatcatcctcctaaaatgtctgtaagtaaataataacaagcagtgactggttcaacaaagaatttgcttaaattctactacttattattttctctactcatttaatataactcaaatcaaaaataattaaacattttgtatataaaaagttaacagatttgccataaaatcatacgaacggagtatgaaatgaacctttatcttctataatttaaaaaatgagatttatgcatacatctgaccaaatgtgcataaatctcatttctttatattaatcttggcaagactcacatacaccataaacttcaagtttgtgtttgtgaatattaacaccaggtagtgataattttatctgatctattggacaataatctattacctttgtatctccacacttttcacagataaaatgatgatgatgatggtttgtacaagcgattctaaacttcatttcaccatcaagttctgtattttcaataatccctaaatctttaaataagtgcaggtttctataaattgtgtcgaatgaaattccaggataattttcatccatacgttgttgtatatactttgcgtttatatacttatcttcttcgacaaaaatatctaacatatctttacgtttatctgtatattttaaaccgttctcttttaaaattttaatagcatcatttgtattcattgatattagctccctttttaaacttcattcgcattttctgataagccattgtaatcataagtaaaataactagtagaactacaattacaccacccggagaaatgtccatatagaaagctaggactaagcctaatattactgataattcacctaaaaatacacttagtaatatcaattgcttaaaactttttgttattcgcatacttattgcaattggtaacgtgattaacgcacttactaacagtatccctacaacacgcattgaggcagaaataaccatcgctacaataacaataaataaaaattgaatccatctaggaatgccaatgactttactatattcctcatcaaatgacaatataaataattctttataaaacaatgtaataaacagaacaactatgatggcaatgacaataatcgttgttaaatcacttatattcactgcgcttattgagccaaatagtaatccaacaatttcttgattgaacccatcagctaatgaaatgaagattgcactcaaggcgataccagcactcattataattggaatagcaatttcttggtaagcagtgtatgacgttcttaatttttcaattagaagcgcacctactattgcgaataagattccaaaccacattggattaataaatactagtgttggcataatagtaagtaaaaacataccgaaggatataccacctaaagttacatgacttagagcatcagctataagtgatagtcgtctaacaacgataaaagcaccgattagaggcgcaataaaacctatcaagataccactaattaaagagtacctcataaaatcaaaattcaataatgcatctatcaattgtgacacgcctttccattttaaataaactcaaatctttattaattacaacattctcgattatgctgatgatcgacaaaacgtacaggatgtccataaatttttgaaatttcaacttcatcaagtgatttaaactcatcagttgtaccatggaaatgcaaatgcttatttaaacatgctacttcagtagcagtatctgctacaacaccaatatcatgagtaactaagataatggtgataccttcttgttttaattgatctaaagtattataaaattcacttacatgttttgcatcaataccattcgtcggttcatcaagtactaatactgcaggttctgaaatcaatgctcgagcaatcattacacgttgttgttgaccacctgataattctgctatatttttatgaattaaatcacttatattcagtctttctagtactttaatcactttttcattatctttgctattaaatgtttggaaaagacgttttgtctttgttaatccgcttaaaacaacttctttaacacttgctgggaaacctgaattaaaggcatttgctttttgtgatacatagcttaatttaattgatgttttcttatttttaaaatcaataccttcaacaaaaatctcaccactttgtaaaggtaataatcctagaatcaacttcaataatgttgatttaccagcaccatttggtccaacaattgctaaaaattcacctttatttattttaatgtttatattttctaacacttttttatgatcatagtagtaattgacatttttcaattcaaagactggtgtcatcgtattctcacctcgcattcaactatacaactcctagtaacatatgtaaacagtaatgtttacgactcaaaattagacaaaataaagagatatgcccccttcaagttttatttatcgcatttcttgaagagagcattatcattttattgttgcataaccttattttttaattctgggtcaaattgctgttgttttaacatttcaatttcaagcttatatggcggttttttatttttcttatcttcaccaacataaggtgtttctaagattttcggaatatctttaaaactatcatgatgcacaatgtaatttaatgcatcaaagccaatgtaaccgaagccaatattttcatgtcggtctttttgagcgccacggtcatttttagaatcattgacatgaacaactttaattctgtcgactccaatgattttatcaaattcatttaatacgccatcaaagtcctctttcacattatatccagcatcatgcgtatgacatgtatcaaagcatactgataaacgttcgttattatgaactccatcaataatacgtgctaactcttcaaacgagcgaccaatctctgtacctttacctgccatcgtttcaagcgcaatacgtacattattgtcattcgttaaaacttcatttaatccttcaataatcttattaattccggcatcaacaccagctccaacatgcgcacctggatgtaatacaatatctttagcgcctatagcttgcgttctttcaatttcttgttgcaagaaatctacaccaagattaaacgtttctggtttggttgtatttgcaatattaatgatgtatggtgcatgaacaacaatattagataagccatatttttccatcacttcatgacctttagttatatttaaatcttcaatacttttacggcgcgtgttttgaggtgcaccagtataaatcataaatgttgtttcaccatattcatgcgcttctatagcagaaccttctaacatctttttaccactcattgaaacatgtgatcctaataacataaaacacacctaaccttttttgttttgcttacgtttttgtctattttgctgcttactaaattgtttacgctcttgacgtttcattttttcaacttcttgtttaaatttcttcttataacctggtttaactttgtttttaattttacttcgaactttgttcttcacttgattagttaaatggtcatctttgcgcattcttgcttgacgctgattgtgcgctttaacttcttttaactcaccatctttaatatcaacagtattgaaaacaaaaccgcgatcttctattaatgaaatattgtgttcttcatcaggactataaagcgtaattgctacacctttataattcccacggccagttcggccgactctatgtgtaaagaagtcaatatcatttggcacatcaaaattgatgacatgactaacaccttcaatatcaataccacgagatgctaaatcgctggcaataacgtattggaattctaaattacgtatacgtttcatttgttgtttacgttcacgtggcgttaaaccaccatgaatcataccaactttaataccagcttcatttagtgaacgtgctaaatcatttgcattatctctactattacagaaaataatacataagtatggatttagtatatcaattaaatttaaagtcttttcaactttagctgcacctttagtaggtattaaaaagaattcgatgttctttttattttgttttttactgtcgacagctacatattctggatgacttaaatatttatttaaaaatggttgtaactgttgtggaattgtagcactaaacaccgcaatatttgcattatcttccaatcttgcagcaatgtaatctacatcttcaattaatcctaagtcaatcataagatccgcttcatcaataactaaatatgatgctaagtgcacatgtaaatgtcccgttttagctaaatcattaattctagtaggggtgcctataatcaattgtggttgtgcattacaacgttgtctatctttctctatatctgtaccaccaataaaaacttcaactgaaacaccagctttaaattggcttatatggttcgctgcatcgtatagttgttgtgcaagttctcttgttggtgcaactacgattgcttgtggttcttttatttcactatcaattaactgcattaatggtaataaaaatgcatgagatttccctgtacccgtttgagattgaccaattaaatttgttctctttagtattcttggaataattcgattctgaatttcagttggtttttcaaaattaaggtctttcacagcgtcaattaaactagattctagattaaattgttcgaatggatgttttgccatgatttggcctccttatatgttcatctttactattataaagtataaatgtgctattttaaataaaaatattaaaacctcgaaatttcaaaatttagaaatcccgagattttagtttaaatatattgaaatggatctgtattaattgtagatgcttcaacatctatatttattttttctgtattgaaccaattcattagtaatgtttttaaaccttctttcatcacatattcgctgtaatgattaatatcaattaagttcacaccctgaattttagcatctaaggcatcatgatgtttaatatcacctgtaacaaagacatctgcgccttgttgaacagcttgatattcatatccaatacctgaaccaccaataattgcaatacgtttaattttctgattagactcaccaacaaaacggacacttgggatatttaatttagatttaatatcagctgcgaaatcttccaatgtcatttgattatccacttctgccataacgccaagtccataaagagatgtttgttttatctcaataaaatcaaataccggtgtttcatatggatggtattgtttaattaattgctcagcccttaacttttgacatgcatctatcataaattcaattttaacttcatctacatattcaattttatcaatttgtcctattgttggattagcttcaccaactggtttgaattgccctcttcccttactttcaaagaaacaatattcataattaccttcttgtgctaatccattttcactaagcttatctttaaatggtccaacattatccttaggtatatatgtttgaactttatagtatacatcttgttgattatttattattgaaatgttcttcaatcccatcgccttcgccaacatcatattgacaccatgaggatttacatctaaatttgtatgcatcgctattaaattaatgtcatgttgaattagttttctaataatcaaaccataaccattagcttttaatgctgttacgcctttaaagattagaggatgatgactaataatagtattatagcctttttcgattgcttcatttactacttccaacgtacagtctaatgctgttaaaacaccagtaacttcaacatcttcatcacctattaacaatcctacattatcccaagattcagcagttctaaatggcacatgatgatctaacaatgtcattaaatcagctattttcattactataacaccctttcaattacagcaatttcttcattaatttgagctaaacgttgatgatgttgttcagtattgagtttcgatttaatatgataaagtgcttctaactctctttgccatttttttataaaatattcatttttgttgttcagcaattttggtccgaatttcaattcatcagatgatagctctattaattgcgcagaatattctgctacaacaatttcataaatatggcctttttcttccattattatttcatcaattatttcataattcaattgttgtaatgtttgtcttaaactttcggtttggatattactttgtaaaatcaaccttggatgttgacttaacttatcttgcccatcttttaaaattttagcaataagtggtccgcccataccacaaattgtgatattatcgattacgtcctcaggatgaataacacttaagccatcccctaaacgtacatcaattctatctactaattgatttgcagctacatttttcacagcagcttgaaaagggccttgaataacttctcctgcaataccgcaatcgcataaatggttttgaattgcatagattggcaaataagcatgatctgagccaatatccgcgattgtaccttgttttaaaaatcgacttaccgtcgttaatcggttatttaacgaaatcattttcttctcctttatgaaaaaagaggttgaacattattcaatgtaccaacctcactcaagttaaatcttaatctaaaaataaacaagcgcttattcatgtcttggtatcaatcattaaaattgatataaattaatccataaagtctttcaaacgtttactacgacttggatgtcttaattttctaagtgcttttgcttcgatttgtcgaatacgttcacgtgtaacaccgaaaactttaccaacttcttcaagtgttcttgttctgccgtcatcaagaccaaatcttaatcgtaatacattttcttctctatcagttaatgtatcaagtacatcttctaattgctcttttaataattcataagcagcatgatctgaaggactttgtgcttcctgatcctcaataaagtctcctaaatgactatcatcttcttcaccaattggtgtttctaatgaaacaggttcttgcgcaatttttaaaatttcacgaactttttctgctggtaaatccatttcttcaccaatttcttctggtgctggatctcgacctaagtcctgtaacaattgacgttgaacacgaattaatttattaattgtttctaccatatgcacagggatacgaatcgtacgtgcttggtcagcaattgcacgagtgattgcttgtctaatccaccatgttgcatatgttgaaaatttaaatcctttgttaaagtcaaatttttcaacagctttaataagacccatattaccttcttggattaaatcaaggaataacataccacgacctacatatcttttagcaatacttacaactaaacgtaagttcgcttctgcaagtctcgattttgctacttcatcaccttgttcaatacgtttggctaattcgatttcttcttgtgcacttaataagttaacacgcccaatttctttaaggtacattcgaactgggtcatttattttaacacctggaggggcactaagatcacttggattcagtttctcgtcagtatctgaactatctttttcattaactagtgaaatatcattatcatttaattgatcaaagaaatcatccatttgatcagagtcgatatcgaaattctgaagtttttcagcaatttcttcatgacttaaatgaccctcttttttacctttttcaattaattgcttcttaacatcttctaatgttaatgtcggatcaattgtttgttttttaattttaactgtgttatcagacatgaaacggcctcccgattttaaatatgaacattcgaaatttattcaatattgctattttaaactaaattcttaattaattcatccatatttttaattttattttacaaataggaactaatcccaatatttatttttcaatagtgttgtttaaatgcggtaactatcatttacccttatacattttgacataatcattattcgtattattctttaataccacatgctacatgcgttctttattcttagcaacaatttgctgtaaatagtatttctgtaattctacatcgccaatccttgtagcttcccttaatttatgattcaatgactcaatggtttcttgtccgttttcattaataacattgacataatcatcaatttcattttcatatggttcgtcattcaaactatattgttctaggctaattaatgtttctctcaactcatttgaattaacatactgtacagcatcactgatattatattgatcattttccgcataaaaatcatgtaagacttcgaatacatatttaaaatgctgatttgtgaagttatccttatcaacactttcataataatttaaaaatgtatctttatctctcattaaatgttttaaaaatgctcgctctgctttttcttgacggctcaaattgtcaaattgtgccataccaattggctcaggttcaatataaccgccatactcatcttctggataataattggctggtgcttgattgaattgtatttcgttagctaattgctcaggactaacattgaaaaatggcgcaacatcatttatagccttttgttgtagaattgatgacttcataaatgaaatgtcatgactcagttctttcaaataacgttcatatgaaaggtcattatgtgcaatttcatcttttaatatactcactttataatgtgcaaatgactttttgtcattttttacaaaagcagtaaatgcgtcgttgccatacttaccaatgtattcatcaggatccatgccagatggcaattgtataacaaatacatttagcccttgctgtaacaaatgttgacctgttttaagtgttgcttcactacccgcaaaatccccatcaaacattaatgttatatttgatgttaactttcgtataaaggtaatatgttcatctgacaactgtgtacccattgttgcaacaacgtttttcaagccagcagtatcagattttataacatccataaaaccttctagtaatacaatttcatctaattttctaattgatttacgcgctttatctaagttgtataacaactttcttttttgaaaaataggtgtttcaggactatttaggtattttggttcttgaccggtatatgttcggcctgaatatccaacaattcttccttgcgcatttttcaaaggaaacataatacgatttcgaaatctatcgtaataactgaagttttcttcattacgtgataataatccggcttcatatgctaattcaatatcgtaaccctttttttgaagaaaatcatgacaaaaatgtgagctatcgggtgcaaagccaatgcctcgctctttaataagcgcatctgtaaaaccacgttctagtaagtatgttaatgctttttcgccttcgactgtctttgttaaagcgtaatagtaaaattcttgtattaactcatgcatttcgatcatttgtaaatcatcagaagcaatttgaacatttgagttagattgtgttgcctcaatatctacagcaacattaactctatcacctaattctttaaccgcttcaacaaatgatatgtctttaatttcttgagtaaattgaaaaacattgccaccttttttacaaccaaaacaatgacaaatttgtttatcttcagaaactgtaaatgaaggtgtcttttcatcatgaaaaggacacaaacctatataattgcgtcctctcttttctaattttacatattcacttaccaagtctaaaatgtcggttttatcttttatttcattaatgatcgattgatctattcgcaaattaaatcacctattaagcattagttatactattatacctaatttttgacaaaaatgaaatcatttcgatttattttgttcaatataatggattatatcgtttgctgtttcttcgattgctttttgagaaacatcaatgacaggacatccaatttcacttacgatttcttcaaagtaattcaattcttcttgaattcgtgcttctgttgcatatcgagctgtgtcacctagtcctaattgttttagtcgctcttttctaatacgatttaatttttcttcacttattttaagtgcgatacatttctttggatcaatatcatataagccatctggcggtgtcacttctggtacaatcggtacattcataactttgtaactcttatgcgctaaatactgggataatggtgtctttgaagttctcgaaataccaagtaaaacaatatcagctttaggtaatcctttaggatctttaccatcatcatatttaactgcaaactctatcgcatcaattttcttgaaatatgcatcatctaatctatgaacgatacctggctcattataaggtttttcttcaaccgatgctgataataaatccattaatggccccataatatcgacggacttcaattggaattctgctactttctcactcatatattgcttcatttcaggtttaataagtgtataaacaatgatagcatttgtatctttagcaacttgaatcacttcatcaacatcttcaaaagattcaatatatggatatcttaataattcatttttacattgcttaggattaaattgtgaaatacctgcccttgcaactaactctgccgtttcacctatagaatctgaggctacgataattttaattttttccattacttctcacctattctttatataatgctactaataacttagctattgttgttttggaaattctcccaattacttcatacttttgattatctttttttcttacaattggaatcgaatcaatttctttttcaatcattctatctgctgcgtatatgactaattcgctttcctctaaataagtgacattaggcatacgtgtcatatttacactgataggtactgtatgaatatctgctccaatcattgaagctcttaataaatcttttcttgaacacacaccaacaaaatcgttattttcattaataataaataatgtacttacatcttctaaaaaaattgtacaaatagcgtcataaactgttgtattctctcttagcacaacaggttgagacatatagtccttaacctcaaattgtcgaagtttttcattaaaaaatttaccttttgatttacctgaataataatatccaactcggggacgcgcttctaaaaaacctgacattgttaatatcgctaaatctggtctgagcgttgctcttgttaaattcagcttatctgctatttgttcaccagtaatgggtccttgagttttaacaatttcgatgattcgttcttgtctttgactgagttctataggtcttcaccccttttttattcacttattattataccgatatttctttcatgtcacaaacacattaattttacttgcctttaaataatctatcaattagaataaacgtacagcgagttaaggatagtgtaagcttaacaataagattggcgcaacgaatcattttaaaataaaagcgagtgactacactaatttgggtggaaccgcgggttaaatacgtaacttattttgtattatatacaatttaaaatattaactcgtcccatggaagtaaagcatatttactatgctgttattttccatggggcgttttcatgtatgaggagaggtaattatggcaaaagatatggatacaattgtttcattagcaaaacacagaggttttgtgttccctggtagtgatatttacggtggtttatcaaacacatgggattatggtcctttaggtgttgaattaaagaataatgttaaaaaagcttggtggcaaaaattcattacacaatcaccgtttaacgttggtatcgatgctgcaatcttaatgaatccaaaagtatgggaagcttcaggacacttaaacaacttcaacgacccaatgattgataataaagatagtaaaattcgatatcgcgctgataaattaattgaagattatatgcaagatgttaaaggtgatgaaaacttcattgccgatggtttaagttttgaacaaatgaaaaaaattattgacgatgaaggtattgtttgtcctgtaagtaaaactgctaactggactgaaattcgccaattcaatttaatgtttaaaacattccaaggtgtaactgaagattctacaaatgaaattttcttacgtcctgaaaccgcacaaggtatttttgtaaactataaaaatgtgcaacgttcaatgcgtaaaaaattaccatttggtattggtcaaattggtaaatcattccgtaatgaaatcactccaggtaacttcattttcagaacaagagaatttgaacaaatggaacttgaattcttctgtaaacctggtgaagaaatcgaatggcaaaattattggaaaacttttgcaagtgactggttaacaagcttaaatatgagcagtgataatatgcgtttacgtgatcatgatgaagatgaattatctcattactcaaatgcaacaactgatattgaatataaattcccatttggttggggtgagttatggggtatcgcaagtcgtacagacttcgacttacgtaaacatgctgaacactctggtgaggatttcagataccacgatccagaaacgaacgaaaaatatattccatattgtatcgagccatcacttggtgcagatcgtgtaacattagctttcttatgtgatgcatatgatgaagaaggcgttgaaggtagtaaagatgcacgtacagttttacacttccatcctgcattagcaccatataaagcagcgattttacctttaagtaagaaattatctggcgaagcgattaagatttttgagcaattaagttctaaattctcaatcgatttcgatgaatcacaatctatcggtaaaagataccgtcgtcaagatgaaatcggtacaccttattgtgtaacattcgactttgattcattagaagataatcaagttacagtgcgtgacagagattcaatggaacaagttcgtatgccaatctcagagttagaagctttcttaactgaaaaaacaaaattctaattaaaaagactctccaccatatgtggtggctatataatttataaaaagagatactggttagtaaaattgccagtatctcttttctattcgaaaaaggtattcaaataaacacatttatgtggctacttgaataccttttattattttatgttattgttccaatctttttaattggttgattagtttctgacttttaaaaaacatacctgcatattcacgatataacattaaaatgatatctgacatttcatcaataatttcttgatggatattcaatgaattcattttatctattggtaatttttgtaatacatctaataaatatagtgttttattcgataatataactgcatgtacatctttagaggcctcttgccttgaaatcgcaccgtcaaacttaaaactataacctattaaatctgcttgtgtgtcattaccactcacagcacagcgattaaatgatgcggtaaaaccaaatcgtttcatacactttaacataacaacgactgacattaactgtgcagatgtacctgattctattttttcaagaacaaattgtaataattgatagttatatggtgcaatgtccccttcatccattgaacgctcaatagtttcagctgccagagacgcataactgcttacgtaaaggtccatttgtaatttataatgttgactaataacatctacagaatttaacgttcccatacctcgccactgattgtaaataaacaaaccataaacaaacaattgcgtttgcgcttgcaaacccgtcttaacttttttagcacgccttgccataagtggtacttttgcaccatgctcatttaaaatcgtgataattatatcagattcaccataatcaactgctttgatgataatccctttttggcgcattaacaattatcttcaccacttttaagattaatcttggtcttcaacataaccaatttggcgaataaagttaactttgtttcgccagtctctttgaactttgacccataattccaagtaaactttagagcctagaagcatttctatatcacgtctcgcacgttttcctacttcttttaactttttaccgccttttccaatgacaattcctttttgcgaatctctttcaacatatatagttgcttcgatatgaacacgatcttcgctttctttaaccatacggtctacatttacaccaatcgcatgagggatttcttcacttgtaagatgaaggattttttcacgaatgatttcacccactacaaattgttcaggatggtctgaaatttgatcatctggataatatttaggtccttcgggtaaatacgtctttaatacatcaataaaatgatctacatttagcccttctaatgctgaaattggtacaatctctgtaaagtccatataactttgatattcttcaatctttggcattaattcatctggatgcactaaatctattttatttaatactaaaaatactggtgtcttaacatttttcaacatttctataatatattcatcgccccgtccaatttcctcattggcattaaccataaacatgattgcatctatctcagataatgtatttttagcgactttcatcatatagtcacctaatttgtgtttaggtttatgaatacctggcgtatcaatgaatataatttgcgcatcatctcttgtcattacaccttgaattttatttctagttgtttgagctttatcggacatgattgctattttatggccaatcactctattaacaaatgttgacttcccaacatttggtctacctataattgaaacaaatcctgatttatgttctgtcatttattctaaatcctttcctgaaaatccaaatggtagtaactctgcgactgtcatcataaccatatctcctttatgatttgtcatatacacaggcatatcatcatcacataattccttcaaaacttgacgacatgcaccacaaggtgatgacggtttatctgcatctacggttacagttattgattcaaaatcacctggtctgtatccttgagaaattgccgataccaaactagctcgttcagcacatatcgataatggataagaagcattttctacattggtaccataaaaagttctaccgtctttcgtttttaaataagcccctactttaaaatgactgtatggcgaatatgattcttgttgtgcttttctaacttcttgaaaataatgaggttgataactcatatatgcctccctaaaataacgctataaaatgtggtaaaaatactattaaacctataataaatgctaatattgaaactataagtacactaaaagccgctatatctttagcgtatttagctaaatcatgatattcaacggtcactaaatctacaacatattcaatagcagtgtttaaagcttcaacagtgagaactaatgcaatagcaatgagtataaaaatccactcaatccgattaatatttagtacgagaccaaagacaatagcaacaatcattgcaaacacatgtaaaagaaatttatagtctttttgaattaagattttcagcccatcaagtgcatatttaaaccttttcataattagtctcgtgttaatccatatgcgtttaatattgtatcttgtcgaccaaacatttccttttcatccgcttcagtcatatgatcataacctaatagatgcaaaaatccatgtaatgctaaaaatcctaattctcgttcaaaagaatgtccgtaattgtttgcttgttcttgcgctacatccgtacagataattatatcccctaaaacacgtggtatatcaagaccactaaaatcaatatctggctcatcttcttctaaagcaaatgagattacatctgtaactttatctttatctctatatgttcgattaatttcttgtatttcttgtttatctacaaatgtaacagaaagctcagcatcgtcttctatatgctcttcttttttagcaaattctaataaatcttcaatttgtttataccaagcatctttaactaagcctgtgtgatcgctaaaatctatcgtaaacatttaattctctccttcataatgttcaatgatcttacttaccaatggatgtcttactacatcgctctgatctaatttcaatatacttatacctttaacgttgtgtaacctactgaccgcttccttaagtccacttttaacacctttaggtaaatcgatttgagtttggtcaccagtaactaccatttttgagccaaaacctagtcttgttaaaaacattttcatttgcgcatgtgtcgtattctgcgcctcatcaagaattacaaatgcatcttctaatgttcgtccgcgcatatatgcaagtggcgctatttcgataatgcctctttcaataaatcgctctgtttgttcacgcccaagaacagtatataaaccatcatataaaggtcttaaatatggatctaccttttctttcaaatctcctggtaaaaatccaagtgactctcctgcttcaacagcaggtcttgttaatacaatacgtttaacagcacctttacggagttgctttgctgcataaactacagctaagaatgtcttacctgtaccagcaggacctataccaaatactaaatcattatttttcatggcattaacatatatacgttgccccatcgttttcgcacgaatcgtcttaccaaaggcatctttagttatctcttcatcatataaatctaacagatgttgaattgtgttattatgcgccattttaatagctgcttcaacatctttaattgtaatattattacctaaatcaataaccttcagcaaattgattaatactgattccgctttttctacgttttctatttttgtacctttaacggcaacttcttgtcctcttgcatggatgacaacatcgaaactctcttcaattgcttttaaatgttcatcattatttccaattaaagcttgagattggttcatatcgtctatttgtataattacaggcatacacgcgctccttttcatatatcatttatattcattctatgatgctttaatatctacttaattatatcatgcaattgattgatttaaacatctttgcattgacttactcatttttctttaatttaaaagaatcatttatacttttcaccttgtcataaaagcagattcaattttagactaatcaatttttcgttgtaatttaaataactcatatttctcgaaagattctctttgtttttcaatttttcttaacgtaaaaaaacaagcaactaccattacgatagtgcttgttttcaaaaaattttataattgttttggtttagctaaaatttctgaccatatcataccattgattacttcatctttatcaaattggaacgctgatttagtcaaatctttttcgacattttgagaattaagcaactgctttaatttcaaacgttttgtacgttcagataagtatttatcctcaataatatctctagcacgtttttccattttagcaatttgcttttctttttctctatcaatgtcagtacgaatcgttttaatatcatctctaagtgatttttctaattgacgtctaatttcgtcagaattatcttgtctagaaggtctatgtttctgttccaccggttctgctttaggcattgtaattggtttctctgtcatcggttttgtttcttgttgttttttaggtgccataggttctacaacaggcttcgatttaggctcttcctttggaagttcatcgaataaaggtggtaacgtatcatcatattttcgtttcgatgatttcttttcttcttcatttaattcttcacttatttctttaaacgttcgctcaatttcttcaaaaaagccacctttttttggttcattatcggtagatgttttttgaggtggcttttgattttgtctatctttatgactattttcgcgcatagtagtaatgatagaaatgatcactgatatgacaaaaattagaataccgacactcatttaatcacctctcgacttaatgttcaggtgactcatcatcactttgatcagttcgtttattaattgcatttctcatgcctgtatcagcttcgatatttttcaaattataataatctttaacactgatattacctgaacgtaatgcttcagccatagccaatggtacttcagattcggcttcaactactttagcatgcatttcttgtacacgcgctttcatttcttgctcagttgctacagccatagctctacgttcttcagcttttgcttgtgcaatatttttgtctgctaatgcttgttcagtttgtaagtctgcaccaatatttttactaatatcaacgtcagcaatatcaattgataaaatttcaaatgcagtacctgaatctaaacctttgcttaatactgttttagaaatattatctgggttttcaagtacttctgtgtgatgcttactagaaccaattgttgaaacgataccttcaccaacacgtgcgatgattgtttcttcaccagcaccaccaacaagtcgagcaatattagctctaactgtgatacgagctttggctttcacttcaataccgttcattgctacacctgcgataaatggtgtttcaatgactttaggattaacagacatttgaaccgcttctaatacgtcacgtcctgcaaggtcaattgcagcagcacgttcgaaaggaagatcaatgtcagcacgttgtgcagcaatattagcgtcaacaactctgtcaacatttcctcctgctagataatgcgattctaattggtttgttgttaatgctagtcctgctttatgcgctttaattaatggcgctataacttttcttggagatacacgacgtaaacgcataccaaccaatgtacctataccaacatgaacgccagctgctaacgctgaaatccataagccaatcggtacaaatgagaataaaataagtaatgcaactactataataactgctattacgataaaacttaaactaaacatggtatcgctccttttaattaatctacttccctcacaactactcttgttccttcaacttcaaggatttttaccgttttattgcgtaaaataaagttgccatctgaaacagcatcaatacgttcattttcacaaaaaataatccctgcaggtcgaagatctgtaactgtttgagcagtctttcctacgaggtgcgagcggttatcatgagaattgtaacctgactcagaattagttgaatcttttaagataactttatccaaaaacggaatctttctgttgaaaatcttcactaatatcacccattctacaatcgttaaaatcaaggcaacgataacattcgcaagcataaatagcaaattatctccgagcgttgttatgcttatagttatcagtatcatgccaataataccaattactgcaccaactacaaataattcaattacaactaatataacgccaattgagaatattaagatagaatgcatattgacatttccttggattagaaatcccaaaaataaaataagtaatgataatgtggcgataataccagctgcattgatttttttagagtaaagttgatatacaaatcctaagaatgtcaaacaggttaatattaacgtaaaaataggttgaacaattatattactaacttgttcaacccaagtatctccagccgttgattccaagatagttgtcatttgtaaaaaattattataactcacaatttcacctcgccctcacattaattatacatgaaattgaatatactttatagttataagaacctatagaatatcaatttgattatttataaactatataactttttaaattaaaaattgacaacaaaaaaacatcacatattagtgtcagacactaacttgtgatgtttattttatataattaatattcgtgttgagggagtcaacagaggtattaattatttgaatttacgtttacgtgcagcttctgatttctttttacgttttacgcttggtttttcgtaaaattcacgtttacgtacttcttggattgttccacttttagaaactgaacgtttaaatctacgtaacgcatcttcaagtgattcatttttacgtactactgttttagacatctgtatttccctccctccaaatatcaacggaactttatagtcaattgcacagtaaaactatgcatttataagtataatatatctgtaatttatggtcaattagtaaattgttttttatttgaaacatatttcacatcaaaatcacaaagacttttagattttgttctaaaaatctcttaataatttatttaatgagaagagttgcttatatagtatattgtgaagccgttaaaacaacgttacaaaacctatatctttaatacggaaccttatggtatgaatcaaggaatacttaaactaaaacttctctatcagatttatttgttgcgaaatcaacaactttaattgcttgcccttcatttaatggataatttgcttgcgtaattttaacttttacaatttgacctatgagtgattcgtcaccttcaaattgtactttcatataattatctgcatatccaactaatgtaccttctgtgtcaccctgttcctcaggaattacttcaagcacatcttgatcaaatttagacgcatataactttccgagttgattgcttagcgtaattaacttatgcacgcgttcatttttaatttcttcatcaatttggtcatccattcttgcagctggcgtgccaattctaggagaataagggaaaacatgcagttcagagaacttatgctttacgataaaatcatatgtttcttggaactcagcttcagtttcacctgggaagccaacaattacatcactcgtaactgccaagtctggtaaagctttatgcaattttgttaatcgttctgaaaatctatccattgtatacttacgtctcatacgttttaatactgtatctgaaccagattgtaatggaatatgcaaatgacgaacaacttttgttgaacgttctaaaacgtcaattacttcatctgtaagttgacttgcttcaattgaagaaattcgaattcgttctaatccattaatcgtttcaagatcacgtaataattgggccaagttataatcttttaaatcttgaccatatccacctgtatgaattcccgtcaatacaatttccttatattctgaattcactagttgcgtcgcttgttcaactactttttccggatctcttgaacgcattaagccacgagcccatggaataatacagaatgtgcagaagttgttacaaccttcttgaatttttaatgacgcacgtgttctatctgtaaaataagggacatctaattcttcatatttacgatttttcatgatatttccaacaccattaattggttggcgttctttacggaattcgtcaatgtaacctaatagtttatgtctatcttgtgtaccaactactacatcgacaccaggaatttccataatttcagctgatgaagtttgcgcataacaacctgttacacagattacagcatcaggattttgtcttattgcacgtctaataatttgacgactttttttatcacctgtatttgttactgtacaagtattaataacaaatacatcagcattcgcttcaaagtcaacgcgctcatagtttgcttctttaaataattgccagattgcttcagtttcataatggtttactttacaacctaatgtgtgaaacgcaactgttgacataaatattcaccccattaattcattttcataacttattgcacttaacgcatacaatggcgcagtttctgcccgtaaaattctcggtccaagaccaacaactgtactagtattactaaataatgaaatttcattttctgacaaaccaccctcaggaccaaaaatcatcaacactttatcctgagccttgaattgttgtaaagtttgcttgaaattgcttaactcaccatcttttgcttcctcttcatatgcaataagaatatagtcataattatcaatagtatcacaaattaattttaaattcgactcgaattgaatagatggaatcactaaacgatagctttgttcagcagcttctttaattattttttgccaacgttctatctttttggcaacttttgcctcgtttaatttaacaattgaacgttccatgctaacagctataaatgatgaagcacccaattcagtagctttttgtagcaaccactcatatttgtcagctttaattagtccactgcaaatcgtaacatcaactggcaattctgtattaatattttgtttttcttttaaatcaactgcgattttatcacttgttatatcagcaatttcacataaataaactgtttgatcattaaaagttaaaataattttactaccaacatcatatctcattacatttgttatatgatgaatatcttctttttttgtaataaaaaaacgctgacttacatcagcgttttggtctatgaaataacgttgcacattattcactcactttctggccaacaagacaaacccaaccgttgtcatgttgttctgaaataattttaaaacctacacgctccatatgtgactgtataccttcatacttctcttttataataccagaagtaataaaataaccgccttcatttagagtattataagcatcttcaatcatttcatcaataatatgcgctaaaatatttgctattacaatatcaaatttttctgtttcgtctttcaataagttacctggaacagcttcaattaacgtttcacaatgatttcttctgaagttttctttagctacactcactgccatttcatcaatatccaacgctttaatacgttttacaccgattagatgacttgcaatacttaatatacctgagccagtaccaacatcaattactgaatgctgtggcaatacatatgtttctattgccttcaaacacatacttgtagtcggatgatctcctgttccaaaagccatacctgggtcgagctcaatgcaaagctcttcatccgcttctttagcatatgtttcccaactagggactattgtgaacttcttcgacgctcggaatggatggaaatagtttttccattcattttcccaatccgtttctgcaatgatttgctcactgaattgaacgttatgttgatcaagttcatctaaatttaataactcatctttaattcgctgtcgcaacttatcatcataagtcatctcattaaaataggctttcaatcttactcccttatctggataatcctcttttttcaaagcgtaaatttcaccgtatttatcttctggttggttaattaaatcatctgaatcttctatcacgacaccatttgatccatgattttcaagtatattggtagccaattctactgcttcatgattaataataattgaaagctctgtccagttcatactttattctcccttaaagaatctttttgctctatctttaaaattcgaaggttgttcattaatttcttcgccatttaattgggcaaattctttcattagttctttttgtctatctgttaatttagtaggcgttactactttaatatcaacatataaatctccgtatccatagccatgaacattttttatacccttttcttttaagcggaattgcttacctgtttgtgtaccagcaggaattgttaacataacttcattatttaatgttggtatttttatttcatcgcctaaagctgcttgtgggaagctaacatttaatttgtaataaatatcatcaccatcacgtttaaatttttcagatggtttaactctaaatactacgtataaatcaccagcaggtcctccattcacacctggagaaccttcaccagctaatctaatttgttgttcattgtcaacaccttcaggtactttcacttctaatttaactgttttattttcagtaccttttccgtgacatgttggacaagcttcttcaaattcttgaccacttccattacatttaggacaaacttgttcagtacgaactctacctaaaattgtattttgttctacagctacatgaccagcgccattacagtaactacaagtctttttacttgttccaggctttgcaccatcaccatgacatgtttcgcatgttacatctttacggattgaaatttcttttgttgtaccaaataccgcttcttcaaatgtcaatgtcattgtatactgaagatcatcacctttttgcggtgcatttggatctctttgtctgccgccaccgaagaaagagctaaagatatcttcaaaaccaccgccaccgaagccactaaaaccgccaaagtcagagccattgaatccttgtccaccaaaaccttgtggaccgtcatgtccaaattgatcatagcttgcgcgtttattatcatcacttaaaacttcataggcttcagaaatttctttaaacttttcatctgcaccttcttctttgttaatatctggatgatattttttcgaaagctttcgatacgcttttttgatttcatcttttgaagcatctttactaatgcctaaaacttcataatagtctcttttggccacagctatctctccttttcttaattaactcatatagtttaacgtaatatgtcatactatccaaataaaaagccaaagccaatgttctattgactttgacttttcagatcatgacaacattctaattgtattgtttaattattttttgtcgtcgtcttttacttctttaaattcagcatcttctacagtactattgttgttttgaccagcattagcaccttgtgcttgttgttgctgttgagccgcttgctcatatacttttgctgataattcttgaatcactttttcaagttcttcttttttagatttaatatcttctatatcttgaccttctaaagcagttttaagagcgtcttttttctcttcagcagattttttatcttcttcaccgatattttcgcctaaatcagttaaagttttttcaacttggaatactaggctgtcagcttcgtttcttaagtctacttcttcacgacgttttttatctgcttcagcgttaacttcagcatcttttaccatacggtcgatttcttcgtctgataatgaagaacttgattgaattgtaattctttgttctttatttgtacctaagtcttttgcagttacatttacaataccgtttttatcgatatcaaacgttacttcaatttgaggtttaccacgttcagctggtggaatatcagtcaattggaatctaccaagtgttttattatctgcagccattggacgttcaccttgtaatacgtgtacatctactgatggttgattatctactgctgttgaatagatttgagatttagatgtaggaatcgtagtgttacgttcaattaacgtattcatacgtccacctaaaatttcaatacctaaagatagtggtgttacgtctaataatactacgtctttaacgtcacctgtgataacgccaccttggattgcagctcccatagccactacttcgtccgggtttacgcctttgttaggttctttaccgatttcttttttgacagcttcttgtactgctggaatacgagttgatccaccaactaagataacttcatcgatatctgagtttgttaagccagcatctttcattgcttggcgtgtaggttccattgttcttctaattaatgaatctgataattcctcaaatttagaacgagttaagtttacttctaagtgtaatggaccgttttcaccagctgagataaatggtaatgagatttgagtttgcgatacacctgataagtcttttttagctttttcagcagcatccttcaaacgttgtaatgccattttatcttgagataagtctacgccattttcttttttaaattctgcaactaggtagtcaataattacttggtcaaaatcatcaccgccaagtttgttgtcaccggctgttgatagtacttcgaatacaccgtcacctaattctaggatagatacgtcaaatgtaccgccacctaagtcaaaaacaagaactttttcatctttatcagttttatctaaaccatatgctaatgctgcagctgttggttcattaatgatacgctcaacttctaaaccagcaattttaccagcatctttagttgcttgacgttcagcgtcgttaaagtatgcaggtactgtaattacagctttgtcaactttctcacctaaatagctttcagctgtattttttaagttttgtaaaatcatagctgagatttcttgtggtgtgtaagatttaccttcaatatctactttataatcagtacccatatgacgtttaatagattgaacagtatttgggtttgtaatagcttgacgtttagctacttcaccaacttgagtttctccatttttgaaagctacaacagatggtgttgtacgtgaaccttcagggttttgaattacttttggctcatcgccttctaatactgttacacatgaatttgttgtacctaagtctataccaataattttactcataataaaattcctccatttaatcattaaattaatttgattttaaacaatgtcgtttcgccaaatttaagttattggtttactttgaccattgatggtcttaatactctatctttaagcttgtatcctttttgtagttcttgagtgatttcgccagattcaaaatcagggttatcatcttgaactacagcttggtgaatatttggatcaaatgcttcaccttcagttttaataacttcaagaccattatcttttagtgcgttaatcaaactttcatgcaccatttgtacacctttttgaagagatttaaaagtctcatcatcaccttcaatttgaagtgcacgttctatattgtctattgctggtaaaatatctgttaacacacgttgtgcttgatatgttttatttatttcattttctttttgaattctacgcttataattttcaaactcagcgtagagccttaaatatttctcttcgttttcatctgctaattgttgaagttcattaattttttgatcttttggatctatttcttcaataacattctcgtcagacgtttcttctattgcttcatcttgtaaatgacctttactttcttcagcttgttcaactgaatcatcaatattttgcttgacgtttgtttcttcaactgttgattcagtatttttttcaactgattcgtctttatttgtcattttctgtcctccaatactttctaatccatcattaccaaattctatttaataattgaatgacattttgataatgcatagctgtaggtccaatcacagcgatttgaccttttaacgtttcatcaaaatgatattgacttgttacaattgaaatatcacttaagctgtcatcaatttcattaccaattttaacattaatatttggtgaagatatatcttgtaataattctgcaattctatttgattctatatattgtagaatgggctgaattgaagatacattactttcattcaatgcatcaataagtttaacctttccacccatataaatgctattactttgattagaaatatgattattcatcgtatttaacaatttattgataaatatttcttcctgctctgattgaacaaaagagataatatcatcttgtaaattctgattaaactcagttagtttgttcgtaacaaaatttgaaattgtatttagtttgtcattactaaacggtatgtctgaagcaagatgtacatgctcaacatgacctgatgaaaatacgataaccattataactaaattaggattagcacgaatcaagtgtacattattgataatatcttgtttatgattaggatgaacaactaaagttgtatattgagatatatttgataattcatctgcaaaatatgtcaatgctgatgatacatcatattgattctcaactaacaattgatttaatcgtcttaatttatttgttttttgatgagatgtttgttcaagtaaacgattgacataatacctaaaacctaattgtgatggcgaacgccctgaagaactatgtgtcttttcgatatagtttaaatcttcaagctgtttcatctcatttctaattgtagcaggactaacattcaagttatgtcgctcaattagtgttttagaaccaacgggttgtccaaaatcaacataatcctcaacaattgcgtttaatatactcaattgcctatctgtaatcatgttttcacctcattagcactcacttatctcaagtgctaattataatttatcaaattggtcaaagtaagtcaatgttaaagactcgaaatttcacatttttttaatcatttattaggaaagcttcaaaaacctcattaccaatgactttccctcgatttgtaagtgcaatcgcatcgttcttttctacaattaatttcttctcttttaaattatttattgtttgaccaaagacactttcaatagattggtcaaacttctttttgaacctactactactcacaccttcatttaaacgcaacccaagaaacatttcttcttccattctctcagtcaaagaaggtttatttgatactaaaattgctttgctttctttatttatagctttgatataatgattcactggattgatattcgtataacgaacaccatctacataaccacttgcacctgctccaaatccataatattcctcattaaaccagtaaaccttattatgttctgattcatggccatctaatgcaaaattagatatttcgtattgatggaaaggagattgttctatcttagacatcagcaactgatacatgtcagcacctaaatcctcattaggaagtttgagcaaaccttttctatacatattataaaattgggttttaggttcaagtattaagccgtaactcgaaatatgttgaatatccatatctaaagctagatctaaactttgttcaaaatcttcaatcgtctgtttcggtaaatgatacattaaatctaaactgattgatttaatacctgcgtttttagcatttaacaccgaagcgtaaatatcttcagtattgtgcgttctacctaaaacagacaataactccggcttgaatgtctgaacgcccattgaaattctgtttactccatatttctctaatagttggactttctctttagttaactcatcaggatttgcttcaaatgtatactcacctgtgattgtaaacgtatcacgtattgctttaagtaatctttccaactgattaatagaaagggccgttggtgtgccgccacctacatacatggtctttaagttcctatattttgctgtagacatttctgtgattagtgcatctaagtactcatctacaggttgattctgtataaaatatttattgaaatcacaatatgtacatattcttacacaaaatggaatatgtatatatgcactttgtaccgtcattttaatgccccgcttctcagactttttatccaatcggctatatcctgttggactatctgcaattattcttacttttaactttaacgtttaatcaatgattgtctaatatatcgattcattttaatatttataaatgttaagagggagtgagatagaaataataaagaaccactaatgatttattatgtagtggctcttacacattagccggaggtaatatgtacttaaaaatagaattacatgagttaaactcatgcataagggagtgggacagaaatgatattttcgcaaaatttatttcgtcgtcccaccccaactcgcattgcctgtagaatttcttttcgaaattctctgtgttggggccccattgttataagctcattttaactctgtcgatgactgccaatataacattgtaaagcccaggacgttaatttatcctaggctccctctttttagttattaaactttattcattgtaaattgttaatagattttttaaaaattattcgtcatccattttcaatacagctaagaaagcatcctgtggaatttcaacattaccaactgctttcatcttagctttacctgctttttgtttttcaagtaatttacgtttacggcttatgtcaccgccataacatttagctaaaacatttttacccattgatttaatatttgtacgtgctacaattttttgtcctattgcagcctgtacaggcacttcaaattgctgtcttggaattaacgttttaagtttttcaactaatgctttaccacgttcatatgcaaaatctctatgaactatgaagcttagcgcatccactttatcaccgtttaataaaatatccatcttcactaaattactttctttattttcgatgaactcataatcaaatgatgcatatcctttggtattagatttaagttgatcgaagaaatcaaatacaacttcagctaaaggtaattcataaacaatatttacacgaatatcatctaaatagtccatatttataaattgtccacgtttacgttgacataattccattactgcacctacatagtcatttggaaccatcatagttgcacgaacatatggctcaaatattttatcaattttatcacgatctggcatttgtgctgggttatcaaccgtcacttctgaaccgtcccttaaaatacattgataaattacagatggtgcggttgcaattaattcaatgccaaattctctttcaattctttcttgaattatttccatgtgtaacatacctaagaaaccagttctataaccaaaacctaatgcttgtgatgattcaggctcgaattctaacgatgcatcattcaattgtaatttttctaatgcttctcttaaatcattataatttttgttatctatcgggaacagtccgcaatataccattggattcattttcttataaccttgcaatggttctgatgcaggtctactagctaatgtgattgtgtcaccaaccctagaatcatcaacatttttaatacttgcaataatataaccaacatcaccaactgttaattcatcaactggaagctgcttaggtgtattaattccaacttctgttacttcgaactctttaccagtggccatcattcgaattttatctccggctttaacaacaccgtctacaattcttatcgatgaaattacccctctatatggatcatactcagaatcaaaaattaacgcttttagtggtgcttctgggtcaccatctggagctggcacaacttcaactattttctcaagtatctcttcaattccaatgttagatttagcacttgctaaaacaacatcatcttggtctaaacctatcatatcttcaatttcttgtttcacgcgttcaggttctgcagcaggtaaatcaattttgttaataacaggcaataactctaactcattatctaatgccaaataaacatttgctaatgtttgtgcttcgataccttgagccgcatctactactaaaatcgcgccctcacaagctgccaaagaacgtgacacttcatatgtaaaatcgacgtgtccaggcgtatcgattaaatggaatgtataagtatttccatctttagcttcgtactttaaacgtactgcgtttaatttgattgtaataccacgttctctttctaaatccattgaatctagtaactgatcttgcatatctcttgtttcaactgatttggtattttctaaaattctatcagccaatgtagattttccgtggtcaatatgtgctataatcgagaaattccttatattctctcttctttttaagcgttgctcattatccattttatccttctcactttcataaaataaacccgtattatctttcgcatctttgatataataacgtttttaataggtaaatgcaaacgccataatcttggatgaactttgaaattataacaatctttatttaaatacatacttgcgatatgttaatatgttaattacgtacttataattataaaacgtattgattgtgtttccaacacaatttattaaatctgcaaaattttaagctaaccccatcaaataaatgattgcacaacggttagacttttgttaaaatatttcttgttgtaatcaaataaaattttgataagatgaactcacttttaggaggtgacagaaatggcaaatatcaaatctgcaattaaacgtgtaaaaacaactgaaaaagctgaagcacgcaacatttcacaaaagagtgcaatgcgtacagcagttaaaaacgctaaaacagctgtttcaaataacgctgataataaaaatgaattagtaagcttagcagttaagttagtagacaaagctgctcaaagtaatttaatacattcaaacaaagctgaccgtattaaatcacaattaatgactgcaaataaataatctttttaaataaaagttcaagcgcatgcttgaacttttattttttataaagatagaatgaataattccagtattaactgtttatccatatatgatgatttaagtttataatcagtttccgcacaagcatctataatattcaataattcatcaagttgataatgtcttacttgtcctaacgctaattttactctgtatggatgtacgcctattgttttagcaatttgctgtccactatatcctttttgactcagaatcttacattgataaaataatcggtaattacttgtaattagtgcaagtaatttaataggttcttctttcatagttattaaatcttttactaaatgaattgcttgttctttatttcttttctgaatgtattcagtcagtaaaaatacattttgttctaaacttctattaataatttggttaacatcctgcttattgattgttggtctatcgcctaaaaataaaatcaacttttctatctcttgtgagacaatattaaagttaatacctgtcaactcaataaataaatctaatgcatctcttttgatatctttgaaattctcatttaatttactttgaatccatttttttatttcttcttcagacatttgctctatttttttaagtcttgcatgcttttttagagttttagttaacttttttctttcatcaagtttattttgatatatctcaaagacaatcaaattttcgccatcatatttttcaataaattctattaattgatctacattgtgagccatatcttttggtgatttttcacctgtaaatatatatgcatttttaaccaaaattgcttttttatctgaaaagaaaggcaatgttaatgtttcttcaacaattggtgcaatctctgtttcgtataaattatatttcacaaagttaaagtcatctctatcacttttcaaaaattgtgatatgatttctgcactttgtttttcaaccaattcaggcacatctccataaatagctacaatattgtcgctcattcagtacaccctttcattcgtttaacacatcaatagattatatcatgtttctgtatctataaaccacttgcatttctataagagtttgaatcaacttttaaattatcatctaagtcaattgtaacttgaccgttttgttgactattgtaaatgcgactgcgaatcctttgcaatcgtttaacaacttctatgttaggaagatgatacatattgttcttcccagaagaaatcaaacttattttaggcttaatcatctctataaattctttagaactacttgtcttgctcccatgatgtcctacttttaaaatatcaatctccggcaagttatatttttttagtagtaaatattcattatttttactagcatcgcccattaataaaacttttttattttgatatgtaatcatagtaataatcgaatattcatttttatctcggctatttggaataaaactatcaaaaaatagaaaactactatctccaagtttaaaactactaacttgtcttacatccataagtttaatgttgtacttatggcttaatttcgataataacatcaatgtattactactatatcctttattgtatatcactatatgtttaattttaatatgactaataatatattccacttcgccaatatggtcattgtgtggatgtgttaaaattaggtactctaattcatttatccctctttcatttaacgttggtaaaatatgatatttagaaattgaataactaggttgtttagtatcatcaaacactttcccacctgtatcaatcaatacattttggttcttaccaccttcatataaaatactgtctccttgtcccacatttaacattgtaattttgtgatgtgaatttgttggaagcgttattaataatgtcagaataattatagtccaaaacgtaaccaatatatatttacgtttagccaataaccaaaatatgtaataaacagaaattataaatattataaatatccaatcattaaacttgggaacagaaaaatgtgattgcttgattcttgtgaataagtctagtaaccagtcatgaaaattaaaacttaggtcaaccaagtaatttagcggcgttaatcccacaataaaatgacttgtaataaagaataaaatagatagcggaaacaatataatcgaatagtacggtacaaaaatcaaattagataaaaatcccacccattgaagttgatgaaagtttggaatggcaacgataaatgaagctaattgtgcaataaacgtaattatgaataatgattgtaactttgacaattgctgtaaaaaagggaaaagcagcataataaaaaatgaaatgatgaatgaaaattgaaatccaatatcataaacaactagcggatttaaaataaacataattataaatgcaaatgctaatagttgaataccctttattttaatttgcttagtaataagcagtacaagcgttgtcattattatagctcttacagcactaggtgcataatttgtgtattgagcaaataaagctaatacaatgattgtaattcctttaatgacaaataaaggtaaatttaatcgttttaaaggttggtaaattaataatacaattgcagctatatgcgagccactaactgccagcaaatgatatatacctatttctttaacacgttccttaaattgctcattaatttcttttacgtcaccagtaatcaatgccataatacgatccggaaacttaatacccgaatcataaattcgattcattataaactgtttatgtttctcaattaaattagaccggttcgattctaggcagctttgtacaactatactttgtaatttaagagttacaaacttattgtcattaactttgaattgtcctttaacaatacaattacgactttcaattttctttaaatcaaaattctttttatttgttaaaaagaaaggatatatttcattttttaaacttaatctacctttatatgtgtcactaccttgacgttgaatttggattacttgagcacgctcattaaactgagaattacgttcaatataattgatataattaaatattgcttgttgtgaataatgtaaataccatgaggagaaaatgattaaaaagagagaaataggggcataaacgattttatttttacgataagcaatatacaaaagtaaaatgaaaagaaatgtagagagcactttgctagaattccaaagtactcctacaatcattgataacgcgacatacagcaaaacattaacctttagtcagatatttagcaacatattctggtgaaaatggaatttttttaaattcaataccagattgtttgagtaatttagttgcatattcatggttatgataatcttctgcatagtagatacgctttatacctgcttgaataattgactttgtacaatttaggcatggaaaatgagtaacatagattgttgcaccttcagtagatacaccttgttttgcacattgtaataaagcattcatttctgcatgtatcgttctgatacaatgtccatcttcaattaaacatccttcatctatacaatgcacctcgccagctacagagccattataaccaccagcaataatacgattatccttaacaatcgttgcacctacagataatctttgacaagttgaacgtaatgctagcaaatgactttgtgccataaaatattcttcccatttgattctttccaagatgttcaccttccatacttaaaatttagtaacattttctaataatataaggttaatcacaaaaaataaaatttgcaattaaaataatccattatgtcgtgaaataagatttcagtttatcaaaagttttacttccaaaaccttttacttttttcaaatcgtcaatttcttgaaatgcaccttgttggttgcgatattcaacaattgcattagctttagcttgccctactccaggaacagacatcaattctgatacagatgccgtatttaaatttactttagtattatttgtgttcccattttttacgtgcacactgttttctccaaattgtggttcaacattcttttgtcctttatgaggaatgaaaatcattttttgatctgttaatttttcagacaaattaatttgacttacatctgcatcatccaataattgtgctttatcaagtaaatcaactactctatccttagatgtcattttataaacattagggtgtttaacagcaccttttatatcgacatatacaggacctttatttttggaattatctccatctttggcctggacatcttctaatttggacaaactactattttcactagtgctttgtttcagagcagtatctttattttcaaaatctcttgaagtataatcatcttgtctccagaatataaaaccaattaataccataattaaaacaacagcacttataatatataacttccattgagttaaaaaatctttatagcgtaataaaaattgatacaataaaaccactcctcaactttatacacgtctgagcgagtggttttacttttattttttcgcaatgaaaaacaatctttctgcatcttcattatgttcatctatattaaaatcagtaaatgtttcaacatgtttaaaaccaacttgagctaaccaagacaaatatgtcttttcatcaaatgttctctgaaaatgagactcatcaaatcttgaatatgtttcatcttcatgtcgaatgaaaaatgtcatatcatgataaacacttaaaggtagatctccttgcacagcatcccatgctaaaaaaatgtcccctttatcatcaatataactttgattattaaacaaagtcatcattttataaacagtatgtacatcaaaaataaatacacctgaatcagtcagatgatgataaacgttgatgaatgtttcaataactgcagtttcatcttgcaaataatttagagagtcacaaaaaatagtgatgatatcaaattgttgttgcaaatcaaaagatgtcatatctccttcaagccaatttacatttgctgatttttgagctgcaacagtcaacatatcaacacttaaatccataccagtaacattacctaaagcttctaattgaactgttaaactaccagtaccgcatccaacatctaaaatatttgattcatctttgcagtgattttttacaatttcaaaccatttttcatatggttgatcttgagtcaattgatcgtacactaggctcatttctgcatattgcgacataattaatacgcaacctgaccatatgattctaatggtgcatcttgatataacttttcaatattataataatttctttcgtctttatggaaaacatgaaccacaacatcagctaagtcaattaatatccaacgtgcttcattgtatccttccatacgttttacttctatattttgttcattggctacttctttcaccgctctagcaatcgcttgaacttgtcgttcattatttccgtgcgttacaacaaaataatctgtcatatcgctgatacctttcatttctaaagaaatcgtatcttcgccttttttattgtcaattgcatccacagcaattgctaataattcttgtgaattcatttaatcatcctttattctttcgtcactatagttataataatttaaacagtcaattgtcttattatataccgtaatatctttctgtattaaaaatagtactgtgcgtttagaaatttcataaattgtcttatctaaactatcttgattgtatgccatatctcgaatatcatcaactcctgggattgttctaccaggttcgatgtaatctgcaataaaaatcagtttttcagtttttgtcatttgttgacgtcccgtagtatggtatttgatagccattaatacttcctcatcattgataccatattcatgttccatgattgctgcacacactgggccatgtaatatttcactaccataactcagtagatcattacctaattcgtattgtcgaacaatttgatacattttacctaaatcatcatatttacagaaatcatgtaatacacctgctaattctactttactagtgtctccatcataaatttctgctaatttaatcgctgtttctgcaactcttaaagaatgattataacgtttctctggcagtttctcttttgcaagccgttttgctttatcaatgttcatataatccttcccccttaatatagttttcaacggatttaggaacaagaacttggatagacttcccttcactaactctttgtcgaatcattgtcgaacttatatctaccctaggtatctgaattgcaatcataccattttcaacattttgactatttttgtctcgatttacaactacaaaagtaaccatttcttttaagtattcaatttgataccatttctctagttggttatactgatccgtcccaataacaaagtacaactcactgtctttgtgctgctccttgaaagtcttgattgtgtcataggtatagctttgaccaccacgtttaatttcatcgtcgcaaatatttccaaaaccaagctcgtcgataatcatctgtatcattgttaatctgtgctgaacgtctataaaatcatggtgctttttcaatggagacataaaactaggtaaaaaataaaattcatctggctgtaattcatgaaatacttcgctagctactatcatatgtgcagtatggatagggttaaactgaccgccgtaaagtactatctttttcattattatggcaattcaatttctttattatctttagattctctataaatcacgatcatagatccaatcacttgcactaattcactacgcgtagcttcgcttaatgtttcagctaattcttttttatcatcaaagttattttgtagtacatgtactttaatcaattctctgttttctaacgtatcatctatttgtttaatcatgttttcgttgataccgccttttccaatttgaaaaatcggatcaatgttgtgtgctaaacttcttaagtatcttttttgtttgccagtaagcatatgttattctccttttaattgttgtaaaactgctgttttcatagaattaatatcagcatctttattagtccaaattttaaagctttccgcaccttggtaaacaaacatatctaagccattataaatatggtttcccttgcgctctgcttcctctaaaataggtgttttatacggtatataaacaatatcactcattaaagtattgggagaaagatgctttaaattaataatactttcgttatttccagccatacccgctggtgttgtattaataacgatatcgaattcagctaaatacttttcagcatctgccaatgaaatttggtttatatttaaattccaagattcaaaacgagccatcgttctattcgcaacagttaatttgggctttacaaattttgctaattcataagcaatacctttacttgcaccacctgctcccaaaattaaaatgtatgcattttctaaatctggataaacgctgtgcaatccttttacataaccaataccatctgtattataccctatccacttgccatcttttatcaaaacagtattaactgcacctgcattaatcgcttgttcatcaacatgatctaaatacggtatgatacgctctttatgaggaattgtgatattaaagccatctaattctttttttgaaataatttctttaattaaatgaaaatcttcaattggaatatttaaagcttcataagtatcatctaatcccaaagaattaaaatttgctctatgcataacgggcgacaaggaatgtgaaataggatttccgataactgcaaatttcattttttaaatcaccttataaaatagaatttcttaatacaacatcaacatttttaggaacacgaacgattactttagctcctggtcctatagttataaagcctagaccagagatcataacatcacgtttctctttgcctgtttcaagtctaacagcctttacctcattaagatcaaaattttgtggatttccaggtggcgttaataaatcgccaagttgattacgccataaatcattggccttctccgttttagtacgatgtatattcaagtcattagaaaagaaacaaactaacggacgtttaccacctgatacataatctatgcgcgctagaccgccgaagaataatgtttgcgcctcgtttaattgatatacgcgttgttttatttctttcttaggcataataattttcaattctttttcactaactaaatgcgtcatttgatgctcttgaataatacctggtgtatcatacataaatgatgtttcatctaatggaatatctatcatatctaaagttgttccagggaatcttgaagttgttactacatctttttcaccaacactagcttcaatcagtttattaatcaatgtagatttcccaacattcgttgtccctacaatatacacatcttcattttctcgaatattcgcaattgatgataataagtcgtctatgccccagcctttttcagctgaaattaatacgacatcgtcagcttccaaaccatattttcttgctgttcgttttaaccattctttaactcgacgtttattaatttgtttcggcaataaatccaatttatttgctgctaaaatgatttttttgtttccgacaatacgtttaactgcattaataaatgatccttcaaagtcaaatacatccacaacattgacgacaataccctttttatccgcaagtcctgataataattttaaaaagtcttcactttctaatcctacatcttgaacttcgttataatttttcaagcggaaacaacgtctgcaaatcacgtcatcacgaaacatattatgctctggtacaaaaccaggtttatttttatcttcagattgaagtggcgcaccacaaccgatacattttaaaatgtcagacaatcaattttcctcccatgtgatataaccttttttactgaaatgacgtaataatcgtctttcaattaatctattaaacttagtaataaagccatccgttcgtttaactggaacgaccataattgtatataaacctcgacgattaccaccaaatacatcagtaagcatttggtcacctataacaacagtttgatcaggtctgatattcatcttagttattgctttatcaaacgcttttcccattggctttctcgctttaaaaataaaatcgatgtctagatgctgactaaaactagcaacacgagactcattattattagacacgattgtaattgtgattcctttttcattagcttccttaaaccatgctttaacacgttctgtaggttccttaacatcccaacctactagcgtattatctaaatctgtaataatacctttaacgcctttgtccactaacttgtctaaatcaatttgaaatattgattgaacatatgaattcggcataaaaaacttgcgaactaaacccatttaactcacctttacctttttataattgagacactaatgcttcaacagtttgacttgatgatacagctgctttttctaaaaatgcttcgaagctcatttccgcttctccatttgctaagtctgaaactgcacgaactacaacaaatggtacattaaattgataacacgtttgtgcaattgcagttgcttccatttcaaccgccatcgcatttggaaatgcttttttaattttttggcgttgttcaacactaccgataaagctatcaccacttacaattaagcctactttagctgttaattgttgttgttgtacaacttgagatactttttctattaaaggtttacttgattgaaatgctaccggcatctgtggtacttgtccatattcataaccaaatgctgttgcatccgcatcatgatattttacatcatcacttataagaacgtcacctacatttaaactttcatctaaagctccagcagaacctgtattaataatgatgtccggtttaaacttattaattaataatgtcgtagaaattgcagcattaacttttccaatgccgctttgggtaatcactacttctctatcttttaaaatgccagtataaaatttaacatgtgcaactgaaatttcgcttaattgtgttaatttattttttaatattgttacttcttcttccatggcaccaattataccaatcatcctttgattcacctcttttaaaaaatcctagcatttgttattttatcacattttaatcactacaacgacaagtatcataattttcgttactgtataaaacttttgctttatttttataaaaagctttcacaataacgtggtatcataaataattatttttgaactcataacagtgaaatcgatgcttctaatttgtgtatttttcaaaaactaatcatatcaattacatcaaccaatggtgtcaagaaactttattaaataacgagaaaatgctatgtttaaaataataatgatgaaataagaggattttacaatggctgaaaataatcaaaatagtctcgtaacaaagatagctacatacggcagttttattgcaattgcgtcgtttgtcattttatttataagtatatttttaaagttttcatttaatatcgagtttacagcaacaattatgaacatatgtcgctacactctaattctaggatttatacttatgtccttacctgatgttgttgataaaaacatcaagaaaattatattcgatgcatttattatcatcgtctttatcttctttttactttagtagttttattttgtaattacacagttaatcatatttgtttcgtatcgaattcctgtgtgcattaaagattattctaatagaaaacagcagtaagacttttctgagtaatagcctccttactgctgtttttatttgtaacaatataatgacaggtactttatatttcactgacaaagatcattaatgattaactcacttaaattatgatttgaataaatagatatctaaatgcaatttgtcactattgatagttttattatcagcatacatttttaatacctcatgaccatactcaccatttaaattataaaaatcatattctacatttttttcatcatcattatgatatttaacataccctttaacaatgtcgccaccttgttcgtacaacttatacttctcattcaaataatttcttaattgaacatctaattcttgaatggtaacaattttctttttcgtttttactgcagttagttctatttctgtttgatgtccgtcaatccataaattacaaggtatattcttatcattatcgtacttattattgtcacttaaagtaacccctccataactacattgcgttttattggtttctcccccatgacatccgtatccataatttccagcaaatatatcgatatccttatttataaatttctttgaaagtgcctcattttcgaattcaactttaaaatcttttttccaatcatcatttacgaacatgtcatgaaataacaaatcatgcttcaacagtctatcgtttgtttttttattttcaagatcagttggattagcaaatgacaccttagcattatatagacgctttgaatcaagtttacttttatgatgtaagtctgaatattcgattgcacttgctgaatttgtaaaaattccttctaacaataatattaaaataaatcctgttaaatatttaacttcaaactcccccaaaacaattattaatttacatttgagagcgagacataaatgataaagaaccacttatggtttattatgtagtggttcttgagcctacaattttgattatgtatcacgctcataatacttttcaatttgaaataccctgttcgcaattattagttgagttatatcaaccaatacagtgtagcgtaaaaattccaaaccgtttaacagtatatcagaaaaaaatgataattatttcaattatttttattaaatttcataatgattcataaaatattcgcattaaaacatcacaatactgatacacaacaaaaagagcagtacatttgtcatgcaccactctcaaaaaatatattttttcaatgaagcaattacgcgatcttacaaatactataagtatagctgaatcacatattacatttattttataattgaatttagaaattcatcacttatctcataaattgttggtctacttttaattttaactaagtagttaccatattttttaattgtattattaatttttactcttcctactcccaatatgttttctaaatcaattaatgttaatctatttcttttattgccaaacaatttatccattgaaaggagatacaaaaattcataatctatctttttataatgactagttaaataaaccgttaatttttcagtcgcatccatttttggtattaactcatcaagtattctttcttgtcctgctatcaataaatcaagcattgtgtcaataaattccgtcaaatcaccacaattcaaatgatttgaagcagtcataaacgccttgtaatatttcgatttattcctatttataacatatgaaaatgtcaaagcagtataattatcataataatcactcaagagcttggcaattataaatcttccaactctaccattgccatcataaaaaggatgtatatattcaaacagataatgactagccatgattttgaacggctgaggcgcatcaaaatattttaaaaatgttagcatttcacctatatattcaacaattttggtttcaggttgtaacccaacatgtatatatttattcgttgacccatcatgcacaccgacaaaatttttacgaaatagctctccatctaacttatcttgttcgttaatttcatttgaaactaatttatcataaatcgctctaatgtctcttacattatcaactttaatttttttattaagttctatctctttatattgatccacgaggcccctgaacttaagaaagtctgatgattggttatttaacgcatgtgcaatctcttgtttagtactaaatacattttcaatttcattagtactttgtaattcatcgattaataaatcattaaaatattgttctctagctgcatatggtaaagaattaagtgctctatcaatttttctactattaattgatattaattcttgtttttttgatagatttttagtcaccataaagaatagaggatattccaaatcattaactttttttccatttcccataggtatgatattaatattagtattgaaagaagttaaagaattaaatcttttagtatactcgtctttcattttactttcgttatgctcatgaaaaatagtttttaaagttctgtaacccatttgcaacctcctctacttatttaaaatgtatttttagtccaataaatccattttcattagattagctaaatattatcacttttttctttaaaaactatataaatatctatttatccaaacaacagaaacagaagtttcatcataacaaaaaaagagctgtacatttgtcatgcaccactcttccttaaaatatatctaattatgctgtataaatgaatcaccggaaatcaaaacacatttcggcctaatactaacaacatttacagtgatgctattagtcgaaatgtcttttaaaataactgaagtacttctttgaatgagaatatacctgtcaatattgtaacaagtactgcaacgataccaaagatgaacatccaatttgggtgtttataatcaccgacaattgatttctttttacttgcaatcaaaattgcacctaacgtaataggtaaaatccatccatttatcgcgcctgctataattaaaaggctgattggttttccaataattaagaaaatcattgttgaaataacgataaacacaatcacaattaaattacttctttcgttaagtgatttatgaagtgtttttaaaaatgttgcgcttgtgtatgctgagccaattactgatgacatagctgcagcaaataacacaataccaaaaatattctttccaattggtccaattgcgtgttcaaaaactgacgctggtggattttcagaacttagtgtcacacctgttacaacaactcctaataccgctaggaatagtaacgttctcataatacctgtagttaaaataccagcaattgctgattgatttacaaatggtaaatattgcttacctttaatgccagagtctaatatacgatgtgcacctgcaaaggtaatataaccacctacagttccaccaactaacgtaatgattggcaagactaatttcattggatgttctggcgcaaatgtatgcacaaaagcatcaccataaggtggattagaaacaaacatcacatatgccacaactaaaatcatcacaataccaagaatcattgaaacaacgtccataattttttggccacttttacttacaaagattaatattgcaaagattgcagtaatagttgcgccccattttacatctaatccaaaaattgcatttaaacctaaaccggcaccagcaatattaccaatattaaaggcaagtccgccaaatgcgattaatattgaaattacagtacctagcccaggaacaactttatttgatatttcttgacctcttaagccagtgacaaccaatatgcgccatatattaatttgtgcaccaatatcaataatgatagatagtaaaattgcgaatgcaaaactcgccaaaaattgcgatgtaaatactgccgtttgtgttaaaaatgctggtcctattgcagaggttgccattagaaatacagaacctaacaataatctcttatggtttttagtaaattcgaaatcactttcacgatgtttaagctttaaatttctccccattttttagccccctataaggattgaatatcaatgccttctttcattaaaatttctctaattttcgaaacaaataataatgcatgttctccatcaccatgcacacaaattgtatctgcttgtaacgttacttccttattgttttttgaaataactttattttccttcaccatcttcaaaacctgcttaagtgcttcgtcagtatcagtaatcacagcatcactttcttttctactaacgagctgcccatcatcttcgtatcgtctatcagcaaacacttcagaagctgtaattaatccgacattctttgcttctgaaattagatatgaatttgctaatcctactaacactagtgatggatcaaagtcataaacagcttgtgctataacgcttgctatttctctgtcttttgcacccatctgatacaatgcaccatgcggtttaacatgattaattttaacttgatgaatgcgacaaaacccttgtaatgcacctaattgataaatcatcaaattataaatttcctcgttagagatatctatatttcgtctgccaaagcctttcaaatcaggtaaaccaggatgtgcacctactgcaacattatgtgctttggcaagttttaccgtttcattcattacattttcatcaccagcgtgaaaaccacaagcaacattcgcactagtaattaacggaataatttgatgatcaccaccaaaggaataatttccaaatgcttctcctaaatcacaattcaaatcaactcgcattataattccacccctttaacaatttgatgtttttctaaaaatttaatatcaacatcttttgcatctccatcacgatatagtggataatttaaaactgcatataaaaaatcggcagttgtagaaaatccatctatcaccatttcatctaaggtggctttcaatttatcaattgctgaagctctatcatgagattttacaatcactttagctactaaagaatcataatatggtgaaacttgataaccgtgatatagtaaagaatcgactcgcacattaaagccttgtggtaaatgtaacgctgtcactttacctggtgttggttgaaatttcttttcaggattttcggcatttattctcgcttctatcacatgactattaaattgaatatcgctttgtgaaaatggtaaatgattatgttccaataaatacaattgtgctgcaaccaaatcacgttctgctcgcatctctgtaacagtatgttcaacttgaattcgagcattcatttcaataaagtaatgtgcgttatcagttactaaaaattcaatcgtacctgcacttctataatttgctgcacgtgcaactttaacagcatcgttacatatttgttgtcgtctttcttcagttaatgctgcacaaggagattcttcgattaatttttgatttttacgttgtacagaacaatcacgttcccctaaatgtacataattatcctgcccatcccccataacttgaacttcaacatgttttgcaacaggtataaaagcctcaacataaacacgatcatcatcaaagtatttttttccttcacttttagcttctttaaatgccttttctaaatcttcagctttctttacaatacgtatacctttaccaccaccgccactggcagctttgataacaactggataaccgatgtctttggcaagcttctcaatttcagacacatgattcacagcatcatttgatcctggaatcacaggaacacctgcatgatgaactgtttgtcttgctgttattttatcccccatcatttccatcgtttttttagtaggccctataaacgctatgccttgttcctcaacgatttgagcaaattttgttgattctgataaaaagccatatcctgggtgaattgcattagcaccagtgatttgtgcagcagatatgatgtggtcaatatttaaataactatctaaagcattagcttctccaatacatatagcttgatctgctaaatgtacatgcaagctttgctcgtccccttttgcataaactgctacagtttcaatcccatattctctgcaagctcttataatccttacagcaatttcacctctgttcgcaattaaacaacgaagcatttacttaccccctttacttaatacgtaccaaagcttggtcgtattcaacatttgtgccatgatcagctactatttcagtgatttctccagcaacatctgttgttacctcgtttaatactttcatcgcttcaacatatcctataatatctcctttgttaactttgtccccgactttcacaattggttcagttaattctttactgtcttgtaaaaagaatgtacctaccattggtgatttaatgtcatgataatcatttgtcgaaacatcggagttatcatgcgcttttgaagctgtcaaatcattattgttcatactttgatttgattgattactgtgtgcagccaaatgattcgagtcagtgaagtcaatttctatttcatcttcaaaatttttatatttaaatttcttaacatcattttccttcactaatttgattatttgttcgattttttcaatattcattttacaaatccccttttaaaattgttgctaattttttcgaagtatgtcgcatgctagttgtatcaaaaattggagccttttgatgactcttaagaatttcattaaacagaaacatttgttcacgattcttatctacagcttcttggattgatatccatttaaattgaattgtatcttgtggtttcatctgtgctaactttggcagatcaaatttgcatacagttgcaattttggtataaccacctatcgtttgcttatcattaagcagaataataggttgaccatcatttggtacttgaacactgcctagagcaaccggttcagaaatgatatctgcttgattaattggtgcaacgctgtcaccttccaaacgatatcccatacggtctgattgttcagtaattaaatatggatgatttacaattttcgctctagcctcttcagaaaatgcctcgaattgaggtccttgaagaatgtgtataatattattttctggcaataaatcgtcctgtaaatgaatagtctttccaatgttttctttaaagtcattatttattttcactgttattacatcattagctaataactttctacctttgaatcctcctatactgctccgggtatgtgttgcataactttcagcaataggaggtacgttgatagtatgaccaaaagtaagataaccgcgtgcacctttagttatagcacctatttttaaaatgtcacctttctcagctaatatgacagaattcattgatatagttttattatttagcgaggcattaacactaccaccggttataacaaatgtattttgcgtattgaattgaatggtaggaccaatcaaagtatattcaatcgctggaccatcattgttaattaatgactgcgcaaccttaaaactaaattgatccatggcacctgcgcctgaaaatccaatatgttcataaccttttcttccaagatcttgtaccgttgaaaagagacctggttgtaaaatcttaattgacattttcaatcaccacccagtcatcaacattaaatttgccatctgatatatctctttcgatttgtataaattgctgttcatctattgcataaaattgtatccaatctcctgcttcgtacattgacattggttcacgctcgctgctaaatacttttaacggtgtgcgtccaataatttgccatccgcctggagaatctgatggatatagtcctgtttgattattcgcaatacctacagaacctgcatgaatttttaaccttggctgattacgtctaggtgtatgtagttgttcatcaagtccgcctaagtatggaaatccaggcataaatcctagcatatatattaaataaggtttacttgtatgtttttcaataacttgctcaacagttattcgattatgctttgctacttcttcaatatcaggtccatatgtaccaccatattgaacaggtattttaataatacgattggtttgattcacagcatgaacatttttttcattaaatttgttaagttctaaattttcaattaatttagaaggtgttatagcttgttcatcaaaatatattagaactgctcgatacgaagggacaatatcttgaatttctaatatttctttttctcgtatccaccgtaccattgctgtgacatttcgatatgtctcttcggatattttattttcaaaataaatcataattgtctgctcgttaataaatcttacatccactctaaatccccctttgtattgcaataaaccagtattgaataccttttcattgtatcattgagaagcacaagttgtttaataagtaattcaaatcgtatacaataacaaatgataatcaatttgttttcttggaaatattttgctttttttaaaatggagtagttaatattgaagctcttacactaatttaggttctgctatcaatcggtctgatggaaaatttttacttttcatctgtccgattttttgattttgaatataaaaaagcacgaccgaagtatcattaacacacttcaatcgcgcaattaaaaaatctatttaatcatttattggatattaacaatttttacgttcatttcgccaccatttggtagtggaacacgaacttcatcatctaaacctttaccaattaacgctttagccattggtgattcatttgaaatctttccattaaatgcatctgattcagctgaaccaacgatttgataactttcctcttcatcacctggtaattctacaaacgttactgttttaccaattttaacaacgttgttatctccagtatcttcaatgattaatgcgtttcttaacatatgctcaattctttgaatatcttgttcgatgaatccttgttcatcttttgccgcatcatactcagagttctctgataagtcaccaaatgaacgtgcaactttaattttctctacaacttcaggacgcttaactgtttttaattcttcaagttcacgctctaatttttcaaaaccttcttgagtcattggatattgcttttgattttccatattgtcatcttcctttactgaattatactattgcttgctaactaaagactgaatttttgttgtcataatatctattgcaactttattgctcccaccttcaggaataattatatcagcatatttcttagtcggttcaataaattggtcatgcataggtctaacaacacttaaatattgattgataacagagtccattgaacgcccacgctctttagtatctcgtgttaaacggcgtaatattctcaagtctgcatctgtatcaacatatattttaacatccatcatatcacgtaataccttattttctaaagcgaaaataccttctacgataataacatctttaggtttaaaatcaatggtaatatcacttcttgtatgactagcataatcatatgtcggtacttctactgctttaccatttttcaagtctttaagattttcaattaataaatcattatcgaatgcaaatggatggtcataattggtttctaggcgctcgtcgaaagtcaagtgcttttgatctttataatagtaatcttgagcaagtaaagcgacactatgaccttctaagtttttcataatttcgttagttacagttgtttttcctgagccagatccaccagctatgccaatgattgtagtagctttcattagccaatttcctttctcatcatgttgtttggatatatcgggcgatccactttaatttgaacgatttgtaatggatggcgcgccgcgtctaagctgttaccttcttcatcataaattgcttctactacttgtgtaaatgtttcaatttctggaccaaagaattctatttcttgacccggtttaaagttatttcgttgttgaatagtcgcaatttttgtatcttcattataatctaataccaaaccacaaaaatcaaatggtgattttttagattgttgttgaccaaacatctgttcttcataaccaggtgtaccctcaaagaatgctggtgcagtgtccctatttgcacatttatctaactcaattaaccattccggattaatcttaaagttgtctggatctgccgcatacgcatcaatgactttacgatatactgaaacaactgttgcaatataatgaattgacttcatacgtccttcaatttttaatgagtccacaccaatatccatcatttgaggaatagattcgattaattttaaatctttaggactcatcgcaaacggtgtaacttcaccttgattataaaatacatcaagttcaccattatcatcaacttctaataattcataatcccaacgacaactttgacagcaaccacctctgttggaatcccttgcggtcatatgattacttaatgtacatctacctgaataggcgatacacatagcaccatgaataaatgcttcgatttcaatatctactttttccttcatttcacgcatttccatcgcgccggtctcacgtgctaatacaacacgatccaatccttcttctttccaatattctacagctttgtaattagaaagtgattgttgagtagataaatgaatttcaagttttggcgcaacttctttacatgtttcaataattaaaggatctgcaacaatgatacctgtcgcaccagtcttttccaaattacgcaaatatgattctagaccttcaatattctcatcatgtgcaataatatttgtcgtaacataaattttggcaccgtaacggttcgcaaattcaacaccttcagctatttcttccatcgtgaaattatcagcatttgaacgtaatccatattcttgaccacctaaaaatacggcatcagcgccataatgtactgctatttttaacttttctaagtttccagcaggtgctaataattctggtttcttcataactgttttaggagttgatttaatctcttctattgtcttcatgattaacctccttaatatactgtttgtttatataagaaaccttcgtcaaatggtcgatgatcaggttgaatttcttcaattgggtccatcaacataaatttctcatcttcatagatttcaggatcttcattgtacaaatctatcgcttgacgatactgttccgttaccacattaatatattcttccgtttgtagaataccatcgattttaaatgaatctattcccgcctcaaaaaatggtgctaattcttcaattaaacaaatgtcgtttggtgacataatgtgcgtaccattgtaatcttcgtaaactgggtaattattttgtctttcttcatcataaagtaataaagattgttcatcattgcgacgttcaattttcatttggcgatcttggaacgtataataattgcctagtagcatacgctttgattggaacatacaagtcattccttgaacttgcacctcaatttccacatttgaattttcttttatattaataatttcatccaaattcagctcacgtgctaagacagctcttgatgcgcctcttttaccccagtaattacattgaaaatgattagttactaacgtctctgcattccaatgaagtggtattggattctcttgcgccttcacatacattactactgctggatccccgaaaataattctgtcaactcgtatttcatgtaaaaaattaatataatcttctacagcatctaaatgataattatgaaataatccattcaccgccgcatatacttttttatcgtttttgtgagctaatgcgacagcctctgtcatttgttgtctattgaattcccctggaagtcttaaaccaaacttttgctcgccaattacaaaagcatctgcacctaaatcaataagtgtttccatatggcttaatgacttgggtgtgacaagtaattctgtcatagtcattctcctttaattgaaatcgctaatccatcgtctatatttaaaaaattcgttgtatatcctggttgctttattaaccactcattataatcttgaacctttttaaccatttgtcttacatttctcgatctaacaatcccaatatccgatacaaaaccgtgatataaaacattatcagtaattacgagaccttggtgctttaaaagtggtgtatatatttcaaaaaatttctttgattgcgcttttgctgcatcaataaatatcatatcataaactttgtcatttacattttcaaattgctctaaagcattaccttcaataattcgaacctggttttcaaaatgataagtagctaaattttgtttagcatattgaatcatcgtttcattacgctctatcgttgtgacatgaatgtcatcagatatagaagcgaattgcatagaactatagccgattgctgtcccaatttctaaaatatttttaacattattcatacgaattaattgcttaattaaatctaaagtcaaacgatctacgattggtacttcatttacttcggcaaattcacgcaaaacttcgattgaactattttgatgttgatgtaaatctattaaatattttttatttaggtcatccatgttttaaacttcctttatgtaaaataagtcaatatgattatgacaataaaataaatcagccttcacaattgattataattttgccaaccaattaaatgactgatttcgtgttagacgcaaagctattttatttatagaagcgaatcattcatataaaatttaactttagatattttaccatattttcaataaaattataagcgttaattatttatacattgcttgacctaaaaaaatactcttgcctccccatcttaaggttagcaagagtataatctttttaattattcttccatttcagtatttacaacttcttcaatcatgtcccattcttcatcagtttcgattggtactaacttaccaccgtcacctgactcatctggttcattgatcattggtacaagctcaatcatatcatcttcatctgattgagcaccttcttcagctaagataacatactcttttttgaattcaggatgataaaattctaaaacttttcggtataaaacttcatttccctcttcatcgaataaagttaataattcttcttcgttattaatttctagttgtgaatcatgattatgttcagtcatagtaaaatctccttttaatgtagtgaatctaaatagccttgtaaaataaatactgctgccattttatcaatcacttgttttcttttttgtcttgaaacatctgcttctaataatgatcgttcagcagccattgtgcttaatctttcatcccacatcacaatctcaatagaaggataagcttctaataatttttctttatatgttaacgaagcttcgcctcgaaaccctattgaattattcatgtttttaggtagtcctattacgactgtacccacattatgttttttaataatgtctactaattggtcaatacctaattcattattttcttcattgattcggagtgtgtctaatccttgtgccgtccaacccattatatcactaattgcaattcctaccgttctactaccgacatcgagtcctaaaattttatgttgtaacataaattatttattttgctcttttaaatagtaagaaacaagctcttccataataacatctctatcaatatgacgaatttgatttcttgcttcattttggcgtggaatatacgcagggtcacctgataataaataacctacaatttggtttacggcattatatcctcgttcatctaatgttcgataaacattatttaaaacatctcttacatcttgtgttggaagttcttcatagtcgaatttcattgttttatcaaagttttccatttgcgacactcctttaattacaaatataactcactatcatcatacaatattatggctttaaattatagatttttaatgtaatctttaataaagcttaatgattttgagatattttcaggttgtgtaccgccaccttgagccatatctggacgaccgccacctttaccaccaacgattggtgccatttgtttgataagatcaccggctttaacgttatttgttaaagatttagggacagttgcaaccatcgatactttatcatcaacattacttgcaagaatgataattgtatcttgtagtttagatttaaaatcgtccattgtcgagcgaattgctttcgcatttggtacatccacttcagtaaccaatactttatagccattgatttcttcaacttgatcttcaatattacccattttaagtgatgtaatttctttgtcacgttgctctaattgttttaataatgctttttcttcatcttgtaattgtgttaacttatcaactacttgatcattagatttcactttcagctgtgatttcatcgtattaaatttctcttgaatatcttctaaatataagaaagctgctttacctgttaatgcttcaatacgacgcacaccagctcctgtacctgactcacttactattttgaataagtcaatttcagaagtattgcggacatgaataccaccacataattcaattgaaaatggtgccatatttactacacgcacaacatcaccatatttttcaccgaataaagccattgcgcccatttctttagctgaagcaatatccatttcttgaatgttaacgtcaatacctttccaaatctcttcatttactaagcgttcaacttgatcaatttcatcattagtcattggaccaaaatgagagaaatcaaaacgtaaacgatctgcttctactagtgaaccagcttggttaacatgatcacccagtactgatttcaacgctgcatgtaataaatgtgttgcactatggttcttttgaatgtcacgtcgatcattttggttcacttcagcagacactgtagcgccaacatttacttggccaaattgtactactcctttatgcaagttttgaccatttggtgctttggttacttcactaacagcaatttcaaaattgtcattataaacaatacctgtatccgcaacttgtccaccactgactgcataaaatggtgtttccgttaacatgaagtatactgtttcacccgcttcaacttgtgaaacttcttcaccattatatatcaagtgtgttagtgttgtttgagctgtcgcagtatcataaccaacaaaagtacttgcagatgtaatatttttcaatacttcactttgaacttgcattgattgagaattttgacgtgcttgacgtgcacgatcacgttgttgttgcatttctgactcgaatgttgtcatatcaactttcaatcctgcttgcactgctatttcttcagttaattcaattgggaacccgtacgtatcatacaatttaaatgcatctttcccattaatttcatttgttgtcgctttagcttttttaattaattcatttaaaatcgctaaaccatcttctaatgtttcatggaatcgttcttcttcagattttataacacgcttaatgaaatctgctttttccttaacatttggataatatggttccataatatctgcaacaatatcaacaagtttgtacataaatggctcattgattcctaacgtttgactaaaacgaacggcacgacgtaacaatcgacgtaatacatatcctctaccttcattggcaggtaatgcaccatcagaaattgcaaatgcaatcgtacgaatgtggtcagcaattactttaaatgccacatcttgttcgttgtttactaaatattgtttacctgatactttttcgatttcattcattataggcataaataaatctgtttcatagttagtacgtacattttgagaaactgaggccatacgctcaagccccatgccggtatcaatatttttattaggtaatggtgtgtaactatgatctttattatgattgaattcactaaacactaaattccacacttcaagatagcgttcattttctccacctggatacatttcttctgccggatcgtcttgtccatatgcttctccgcgatcatagaaaatctcagtgttcggtcctgaaggtccttcaccaatatcccagaagttaccttcaatgcgaataatacgactttcttcaagcccaatatctttatgccaaatgttgtatgcttccatatcttccggatgaatcgtaacgtacaatttatctggctccatacccatccatttatcactcgttaaaaattcccaagcaaattcaatcgcttcttgtttaaagtaatcaccaattgagaagttacctaacatttcaaagaatgtatggtgacgcgctgtgaaaccaacattttcaatatcatttgtacgaatagctttttgagagtttacaattcttggctttttaggtgtttcacgtccatcaaaatatttctttaatgttgctacacctgaattaatccataataaggtatcatcatcaattggcactaatggtgcagaaggttcaaccatatgtcctttttcaacaaagaaatctagatatttttgtctaatttcactcgcttttaactttttcatcatttacacatcctatttactgtttttaaattaccattccataaaaattgatgacacagatagtcgatttgaaaaactagtataaatcaatatcatttttaattattaaaaaataaaaaacgcccatcctcaaaagggacgaacgttatcgcggtaccaccctagttataaatgcaattcaacacatttatcactttaaatcgactatacagttgtgcataaagtagcgttcactaatgtttgttgtacttttcaccaaccagtacatctctgataaacaaatcattaactactcatctttatacgaatttaattctattttagttacatttacgcttgttgtcaacgttctataaagtcatacggcgtgatttctcccatattaatcattggatcaattttaaacattgtagcttccgttaatacatttgtatctgtttttattgaatcagacgtaacttcttcactatcattcgatgaaattggcgcttctacttgatcatttattgtcgtttgtgaagctcctgtatcattagttgctgtattttccagtatttcttcatcttctgaattaaaataatttttcaacaatgtacataattgtgttaaacgcgcttgaccatttgtttttaatccaatatcaaatgcttctggatcaccaagtaaaactaaactcgttttcgctctagttaaaccagtatataatatcggtctttgtaacattctaaaatactgtttaacaattggcatgataacaataggaaattctgaaccttgtgatttatggattgatgtacaatatgcatgcgttaattccatcatatcttgtttcgtaaatgtaatttcattaccttcaaaatccacaacaagtacatctttattaagagcattttctttcgcccaaaaaataccaacaataactcctatgtcaccattgaatatgttatcatttggcctattaacaagttgtaatactttgtcaccttttctaaaaactacatcaccaaactcaatttctcgtgtgtctttctttttagggtttaaaatatcttgtaaaacttgatttaaacgtttaataccggcatttcctttatacattggtgcaagcacttgaatatcagccatagtatatcctttattaacagcactagtaactaccttctcaacaactgttggtatttggtttgcctgacagttaataaaacttctatcatgaaaacgctgtgtaatatcaattttctgacccaacttcattcgatgtgctaattctataatgcttgaaccatcttgttgacgatatacttcagtcagattaactcgtggtatagctttcgattcaattaaatctttaaatacttgaccaggacctacagaaggcaattggtcctcatcacctacaaatatcaattgtgcatctaaaggaactgcacttaaaaattggtggaacaaccaagtatctaccatagacatctcatcaatgattatgagtcgtgcgtttatttcattttctaatatatcctctggctttgtgtcttgattccaacctattaaacgatgaatcgtcatagcttctaatccagttgactcttgtagtctcttggacgctcttcctgttggcgctgctaatacaactggataatcatcattaacataatcatcataatctaatgataagccatgaatctcagcatataattctacaatgcctttaattactgtcgtctttcctgttcccggtccaccggttaatagcatcaccttagaattgatagccgtttgcaaagcttctttttgtgaagctgcatagttcacttgattcgtatcttctatttcaccaatatgcatttgtaaatctgactgttcaatttccgtaagtttatttgtatgcgtctttattctgaataagttttgaacacttttgatttcagaataatacaaacttggaattgcaacttgttcattgtcaataattagtcgtttttcctcatttaagtattgcaacatttcgtctaatttttcaggttcaatgacctcttcatcttgataatttaatacatcaactgttaagtctataacaacattgataggcaaatatgtatgtccctgtttaatacattcttcttctaacgtatagagcaacgcagcttttaatcgttcattatcgttataagcgataccaatatttctagcaagttgatctgctttattaaaaccaatacctttaatatcataaatcaattgatatggatttcgatctaaaatagtcagtgtatcaccgagataaaactgataaattgccattgaaagtttaggaccaaaccctaaatcatgtaaacgaatcattattttttcagattcttgatttgctgaaatttgttctgcaatttgtttctgtttctttttagataatcccgaaactttttctagcactgaatggtcatctaatatatcatttatcgcattgtcacctaatgtattaacaatattttgagctgtctttttacctacacctttaaacaaatcacttgataaataacttataattgcttctttcgtttgtggcatttctttttcaaaagtctctgcttttaattgtttaccataacgtggatgatcaacaacttgccctttaaatgtgtagacatcgccttcaacaatattcggaagaaaccctacaacagttggcattgtatcaaagtcttcatttgtttcaatagtatctactttaagcactgtataaaaattatcactgttttgaaacaatatcgcttcaacagtacctttgatcattgaataatcaaatagtgtagggtctgacatgttactcctcctctttcattttagtgaatgttttcagcgcatgctgacttaataagtgtttagggtcgatagtcacagcttctttaaaatgagttatggcttcatcaatatcttcatttttcataaataacgctaaacctaaattgtatcttgcatcaacatgatttttatcaatcattaatacatgtttaagttgagttatggcttcattaaacatctctaattgacataatacaagaccatattgaaattgaacttctgcatctttgtctttatctagttccgcagcagtcattaaatacggcaatgccagcttaaatgattctaactgattaaacgccataccgatcatataattacaatcaacttgttcaatctctgtttgtaatgcttgttgatataatttaatagattcttgataacgttgctgattataatatacatttgctagattataaaatacgacgccattcttcggatctattgttaaagctttttggaaaaaacgctctgccttttcaatctcattcgcatcagcaagtacgataccggcattaatataattttcaataattgtaggatcttcttcgatatttccgaacaatgcttgtaacgcttcttctatttttccattttgtatgtattgataaattgtttgttgatctatcatttacgaacctcatttctcatcaattataacatcttgataaattgtatgtctcgaatcacttaacaacgaataaaatataatctaatatcatcttcattcatgaaaaagcgggaatggaatggaaatgctaaagaaccattaacggtttattatgtaatggttcttccacattagccaccactattatgtacttaaaataggaatacataattagactcatgcataggggtgagacagaaatgatatttttacaaaattaatttcgttgtccccaacttgcattgcctgttgaaattggggttccaatttctctatgttggggccccgccaacttgcattgcctgttgaaatttgggttccaatttctctatgttggggccccgccaacttgcattgcttgttgaatttttttacgaatttctctgtgttgggggcccatccccaacttgcacattattgaaatctgactttccgtcagcttctgtgttggaccccgtccctaacttccattgcctgttgaaatttgggttccaatttctctgtgttggcgccccgccaatataacattgtagagcctaggacattgtgatgtcccagactctatcatcatgaattattctcatcaaaaactgtctttcgtcatttccaacgctgaaatttcaaataagtaatttattgttgccattgtttatacaacataatttaattgaccttcatttttgaacacatcgtcaattgttgcaccaccaagacacacatcaccttgataaaaaacaactgcttgtccaggtgtgattgctcttactggctcatcaaaagtaacacgtagtgcatggtcgttttcacgtttcacaaaaactttcgtatctttttggcgatatctaaatttagctgtacattcaaaaccttgatctaagtcattatcttctggatttacaaatgaatagtctgaagcaattaagtaatcactgtataatgcattgtgatggaatccttgttctacatataaaacattatcttttagatttttaccgacaacaaaccaaggatcgccatctccacctatacctaaaccatgtctttgtcctattgtgtaatacatcaacccactatgtttacccattttcttaccatcaagtgttatcatatcacccggttgcgcaggtaaatattgagataaaaatgttttaaagtttttttcgccgataaaacaaatgcctgtagaatcttttttcttagcagtaacaagtccttgttcttcagcaattcgacgcacttcactcttttcgatgtcaccaattgggaacattacttttgaaagttgttgttgagataattgattcaagaagtatgtttgatctttattattatctacaccacgtaacatttcaacatgaccatcttcatgacgatgtatgcgtgcgtaatgtcctgttgctacataatctgcacctaaattcatcgcatgatctaaaaaggctttaaacttaatttctttattacacataacgtctgggtttggagtacgaccttttttatattcatctaagaaatacgtaaagactttatcccaatattctttttcaaaattaacagcgtaatatggaatgccaatttgattacacacttcaataacatcgttgtaatcttcagttgcagtacatacgccattttcgtcagtgtcatcccagtttttcataaatatgccaatgacatcataaccttgttcttttaagacgtgggctgttacagaactatctacaccgcctgacataccaacgacaacacgtatatctttatttgacaattatgactcctccttaaatttaaaatatattttatgaatttcagcgacaattgcattaatttcattttcagtagtcaattcgttaaaactaaatcgaatcgaatgatttgatcgctcttcatcttcgaacattgcatctaaaacatgcgacggttgtgtagagcctgctgtacatgcagatccagacgacacatagatttgtgccatatccaacaatgttaacatcgtttcaacttcaacaaacggaaaatatagatttacaatatggcctgtagcatccgtcattgaaccatttaattcaaatggaatcgctctttcttgtaatttaactaaaaattgttcttttatattcattaaatgaatattattatcgtctcgattcttttctgctaattgtaatgctttagccatcccgacaatttgtgcaagattttcagttcctgcacggcgtttcaattcttgttcaccgccaatttgaggataatctaatgtgacatggtctttaactaataatgcaccgacaccttttggtccgccaaacttatgagcagtaatactcattgcatcgatctcaaattcgtcaaacttaacatcaagatgtccaattgcttgaaccgcatcaacatggaaatatgcatttgtctcagcaataatatcttgaatatcataaatttgttgcactgtgccaacttcattatttacaaacataatagatactaaaatcgtcttatctgtaattgtttcttcaagttgatctaaatcaatagcacctgtatcatcaacatctagatatgttacatcaaaaccttctcgctctaattgttcaaaaacatgtaacacagaatgatgttcaatcttcgatgtgataatgtgattacccaattgttcatttgcttttactatgcctttaattgccgtattattcgattctgttgcaccactcgtaaatataatttcatgtgtatctgcaccaagtaattgtgcaatttgacgtcttgactcatctaaatatttacgcgcatctcttcccttagcatgtattgatgatggatttccataatgcgaattgtaaatcgtcatcatcgcatctactacttcaggttttactggtgtggtcgcagcataatctgcataaatttccatgtttggacactcctcacaattttatcaatgttccaataatagcaccttacatactatttttctacttttctgtttaactttatttataatgtttttaattatattttaccattttctacacatgcttttcgataggcttttttaagtttatcgctttattcttgtcttttttataaattttagtatttgcagatattttttcatttgtaaaatgtaatgtactattatttttgttatgagcaatttaatatttatctcgttattcgattggtatacttcttatatcataaaaaaggaaggacgatacaaaaatggcgattaaatattcagcattaaaccttgtccctattcgagaaggtgacgatgaacgaacagcaattaatgatatggttaagctcgcacaacatttagatgaattatcatatgaaagatattggattgctgaacaccataacgctcccaatctagtaagttcagcaactgctttattaattcaacatacgttagaacatacgaaacacatacgtgtaggttctggaggaatcatgttacctaaccatgctccattaatcgttgcggaacaatttggcacgatggcaacattatttccaaatcgtgtcgatttaggattaggacgtgcacctggaacagatatgatgaccgcaagtgcattaagacgagatcaacatgatggtgtttataaatttccggaagaagtttcattattacaacaatatttcggccccgctcaccaacaagcatatgttcgtgcttatccagcagtaggtaaaaatgtgcctttatacattcttggttcttcaacagattctgcacatctagctgcacgcaaagggcttccatatgtgttcgctggacattttgcacctcaacaaatgaaagaagctatcgaaatctacaaaacgttatttgaaccttctgatgtattagacgaaccttatgttattgtatgtttaaatacaatcgttgctgaaaatgatgacgaagcacaatatttagcttcatctatggcacaagtaatggttagtatcactcgtggcagaatgcagcccgttcaaccgccaacacatgaactacaaaatatattaacgccgagagaatatgcgatggctatggaaagacagaaaatatcattaataggttcagaaaatactattcaacaaaaaattcaagattttatggaaacttatggtgaagtcaacgaaattatggcaataagttatatttatgataaagatatgcaattagactcttatcgtcggttcaagaatgttataaatcagataaatgaaaaaaacactttatagtgtcataaataaactaagtgaaagtatgtatccataatataaataaaaataaacagtaacagcattttaaatgaaagatgtccgtattgatcaatcatttattttaggaatgattcaaattcacttaaaattctaatgcaaatatgaaagcgccccttcaactttacactgtgtaagtgtttatttgatggggcgctttcaaaatattgaaaagcatatccaaaatttaaagaaatttatttctctttatcttcattttcttttttctcttcgttattcgatcctgtatattcatttatcttatcttttacatttttaacttgttcattatcgctatttttaaatttttctactgcgtcttttgctttgtccataaaactcatattaatcgctcctcttatatttgattagtttaattgatcttattttttaagtttatcaattgcatcagttattttatttttagcattttcaacaacttcttttgctttaccagtcgctttatcttgctgaccttctttttctaattctttgttatcagtaacgttacctactgtttctttaacattgcctttaaattgatcgaacttactttcgtctgccatagtgaaacctccttagatgtatatatttatataccacaaaggaggttcactaaacattataatatgaagtttttatgttatagtatagtatttatacaattaaatataaaacatgtatccgtctaaatcttcacttgtatctacatattccgctaaatatttcaatgttgtattatctaaaacatctctcactgcatctctcatgcgaatccatagttgtttttgcgcaggtggttctgattcaatactttcaacaaatgtaattggaccttctaacagtcttataatatcccctgctgagatttcttccgctggcactcttaattggtatccacctttagcaccgcgtacacttcgaattaaccccgcatttcttaaaggacctacaagctgttctaaatataaatcactcaaattattttcttcagcaattgactttaatgatatacatccttgcccctcttttttagcaagagaaatcatcaatgtaagtccatatctccctttagtagaaattttcattgtataacctcacttaattcgaatattgatattcccattttagcattttttgagttaagatagtataagaaaggtgtgacaaatgtgagtacagaaccattagcatcgagaatgcgcccaaaaaatatagatgaaatcatttcccaacaacatttagttggaccaagaggcattatcagaagaatggttgacacaaaaaaattaacttcaatgattttttatggtccacctggtataggcaaaacaagtatagccaaagcaatttcgggcagtacgcaatataaattcagacaattgaatgctgtaactaacactaaaaaagatatgcaacttgttgttgaagaagctaaaatgtctggtcaagttatcttgttattagatgaaatccatcgactagataaagccaaacaagattttttattacctcatttagaaaatggcaaaatcgtcttgatcggtgctacaacttcaaatccttatcatgctatcaatccagcgattcgttcaagagcgcaaatttttgaattatatcctttaaatgacgaagatgtgcgccaagcgttaactcgtgcaatagaagatgaagagaatggtttgaaaacatatcaacccaaaattgatgaagatgccatgacctacttttctacacaaagtcaaggtgatgttcgtagtgcgctaaatgcattggaattagctgtattaagcgcagataatgacaaggacggttatcgacatgttacattgcaagatgctaaagactgtttacaaaaaggtgcatttgtaagtgataaggatggtgacatgcattacgatgttatgagcgctttccaaaaatccatccgtggtagtgacgtcaatgccgctttacattatttagcacgattaattgaagctggagatttacctacaatagttcgacgattacttgtaattagctatgaggatataggcttagcctcacctaatgctggtcagagaacacttgctgctattgaatcagcagaacgtctaggtttaccagaagctagaatcccactaagccaagcagtaatcgaactatgcttatcacctaagtcaaattcagcaatgagtgccattgatagtgcattgtccgatattagaaacggtcatgtgggccaaattccaaaccatttaaaagatggacattatcaaggtgctaaagatctaggccgatctattggttacaaatatccacaccaatatgttaatggctatgtttcacagcaatatttacctgataaacttaaaaacaaaatttattatgaaccaaaaacgacatctaaaagtgaacaacaactcaaagaaatatataacaacttacttaaacaaagaccgtaaaaataagattaaatcgattacctttgatattttagctataatcaaatcaaaactgactagtacacgaggcatattctactatgcttgcgaactagtcagttttagttttatggtgtggttacacatgccttacgttgaaaattatgactttcaaaattaattattgccctttgtctttaatgcgacgaactggaatatcttttaacacgtcattcaccacataacttgcacaaattaatccaacaacacttggcacaaaggcatttgatgaaggtggcatttgtccttttcgattgatagcatttttatctccaacaatatcttttacatcttctcttatgacaattggactttcatctgaaaatacaactggaatccctttacgaattcctagttttttcaatttttgacgaataattttggccattggatcggtatgtgttttagagatatctgaaattgtaaaacgtgttggatctgttttatttgcagcacccatactggaaatcactttaatctcccggtcaagacactctttcattaagtgtactttgtacattattgtatcacttgcatctacaaaataatcaatatcgtaattatcgaaaatttcttcatatgtctcttctgtataaaacatatgtaaaggcgtgactttacaatctggattaattaatttaatacgttcttccatcaaagaaactttactttgtcctacagttgtagttaaagcgtgtaattgtctgttcacatttgtaatatcaacatcatctttatctattaatataatatgaccaatattcgttcttgctaatgcttcagcagcaaatgaaccaacacctccaacgccaagtatgacaacagtttgttgcttcaataaatctaaaccttgttgtccaatcgctagttcatttcttgaaaattgatgtttcattattttacctctttcactgatttatacataagtacatagtaacttaaaattttatgtttagcattattgctttgattatttttccaaaattcaacgaggaaacattttttaagcgctattaaacccaactaattctttattaaaaacttaaagaaaagcataaaaatacgcaagacaaagtcttgcgtatcgatagagtccgtattgccgtagttataatagcttgatcattcggcctgttatatacaggtgggtgccctgtttcttgttttgtacgtccttcatataaggcgtgtacgctgcaagaaaacccattgggctcccttgatcaaagagtgttaggcccaaattaaaaagcaaacttacgaacaactcagatgactatcttatgatgttatattaccacataattaaaattaatgaaattataacaatccaaagtttattgatttttaaaatttagtgacgaattcgcaaagaaagttcttctaattgtttatcagaaacttcaccaggcgcattcgttaataaacatgtagcagatgctgttttagggaatgcaattgtatctctcaagtttgttctattagtcaataacatgactaatcggtctaatcctaatgcaataccgccatgaggtggtgcaccatatttaaatgcatctagtaagaagccgaattgttcctgtgcttgttctttcgtaaatccaagaacttcgaacattttttcttgtaactcaccgtcatgaattctgattgaaccgccacctaattcataaccatttaatactatgtcataagcatttgcctcagcttcttctggcgcagtgccaagcttagcaatatcagcttcttttggagatgtaaacggatgatgtgctgcaacgtaacgtttcgcatcttcatcatattctaataatggccaatctgtcacccataagaagtttaattttgtttcatcgattaaacctaattctttagctaatttgacacgtaatgcacctaaactttgtgcaacgacatttggtttgtctgcaacgaacattactaagtcaccagcttcagcaccagttaatgtaagtaatgtttcaacattttctgtttcaaagaaacgtccaattggacctgtcaaaccatcttccacaactttaacccacgctaatcctttagcaccatagatgtttacaaattctgttaaagcatccatatctttacgagtatattgttcagctgcacctttagcgacaattgctttaatttcaccatcattttcaacagtatctttaaatactttaaagtccatatcacgtcctaattgagaaacgtcaattaattccatttcaaaacgcgtatctggtttatcagaaccatagcgacgcatcgcttctttatatgtcatgcgtgggaacgcgtcattaatttcaacgtctttaacttctttaaccacttttttaagcatttcttcacccatttgcatcacatcttcttgatctacaaaactcatttcaatatcgacttgtgtgaattcaggttgacgatctgcacgtaaatcttcgtctcggaagcattttacgatttggtagtatttgtcaaatccgctaatcatcaataattgcttaaataattgtggcgattgtggtaatgcataaaattcaccatcatggacacgagatggtactaaataatcacgtgcaccctcaggtgttgacttcgttagtactggtgtttcgatgtcaaagaacccttcttcatccaaatattgacgaatagaacgagtaatttgatgtctcattttaaatgtttgcgctaactcttgacgacgtaaatctaaataacggtattttaatcgaatattttcatcaacgttaacattttcttcatttatagaaaatggtggtgtctcagatttattaatcactttaatatttgtaacttgtacttcaacttggccagttttaattttagggttaactgtttcagggtcacgcttcgtaactgtaccttgaacttctacaacatattcagaacgtactgtttcagcaattttcaatgcctcttctgaaaatgcaggattaaacacgacttgtacaattccttctctatctcttaaatcgacgaaaatcaatccacctaggtcacgacgattgttaacccatccttttaatgtaatttcttgtcctaaaaatgcttcagtaactaatccacaataagttgttctcttactcatattttaacgccctctctacttcttaaaatattcgactaatgcgtccaattcaattgtttcagattcaccagttgtcatatttttaacatcgattttattattttctaattcttgatcaccaataacgattgtaaacttggcacctaaacggtctgcttgtttcatttgtcctttaattttacgctgtaagtagtctttatctgctttaataccattatgtctcaaatgatttaataacttcacagcatatcgatctgcttgatcacccattgtaacaatgaataaatctaagttttcttcaatatctaattcgataccttcttcttcaagtgcaagcaataatcgttctatacttagcgcaaaaccaatacctgtttcacttggaccatctagtaattctaataaaccattataacggccaccaccacaaagagttgtaatggcaccatcatagttagggttatccatcattaattcaaatgctgtatgtgtataataatccaatccacgaactaagttaggatcttcaatatatggaatacctaaatcatctaaataagcttttacttgttcataatatgccttagattcctcatttaagaaatcagtgattctaggtgcagtcttaatcgcttctttatcacggtcaactttacaatccaaaattcgcatcggatttgtatgcaaacgtgattgacaatctgaacaaaattcatgaattactggttcaaagtgttttactaacgcttcgttatattcttttcgagacgccatatcccctacactattaataacaagctttaaatgttttaatccaaatgattgataaatatgcataaccatagctaatacttctgcatctacgctaggattttcagcaccaatagcttctacaccaaattgattaaattgacgatagcgccctttttgcttacgttcatatctaaacatcggtccattgtaataaagtttaattggttggtttggattaccttgcattttatgttcaatatatgaacgcacaactgcagctgttccctcaggtcttaatgtaatacttctatcgcctttatctttaaatgtatacatttctttttgtacgacatcggttgaatcaccaacacctcttgcaaaaagatctgtactttcaaaaattggtgttcttatttctttataattgtaaaatgtcattaattcatctaattgattttcaatgtaacgccatttctttgaatcttcaggtaaaatatcctgcgtccctctaggtattttaatcattttgacatctccctcggcaaactattttatttaattacctttttaaaactaaaactatatacgatcacttaactttgcacgataaatcataattttaaaagcaaaagaaaaagcccttgcacagcctgaaactgcacaagggacgaatatccgtgttgccaccctcattggtttaaaaaacatgcctaattgtaatcatcattactttttacaagcgtgcatttaataaacccactcaaaacgtttaacgtacgtttaacggctttacttttcataaagcacctcttcttgtgttcaatgtatataaactactcagcataatctttcagtctatggattatattcctacacaatcttagttagattgctacctatttcatttaccatttcaagaatactaacggttttagttataaaattcaatatcaatgataactactttcacatatttttgcaagccctacgcagaaaaataaattttaaggccatcaacaattgcttgttctaaaatttgtcgatgtaattgatctttaatcattgtttcatcagttgggttactaatataacctaattctaataaaacagcaggaacttttgtttgtcttaacacttgataattttcttgtcttgaaccacgattagaaagtagacctttcttctgtatcgtagcgtctaacgtatctgctaaagctctttgattgtcatgataccaataaactgtcattccatttgcattagatgattctaatgcatcattatgtatactcaaataggcatcgcctttgatatcacgattttctagtgaaacatatgtatcgtctgttcttgtcatcttaacagttgcgccttctttttctaaagtacgctgcaattcttttgctgttttcaacgtataatctttttctaaacttttatatttagtattgcttgaagcaccctggtcactacctccatgaccaggatcaagcactattgttttaccttgcaaaggatttttctccttcgtattatccgcgacaatatctaaatttgtgtgccatccagctatccaacctttttcattactggatgtatcttcaacttcaatccatttacctactttaccaatctttttaaaatggtcacctttctcaactttgtaaatgactggatacgcagcgtttggacctgtacgtaattcagcattttcagttatcgtgatgttaccactatcttcactattgctattcagcaataaaaataaaaagatgataaataagacaaaggcaatcactactattagagtacgtttatttttaagaccctttttagataaccatgcctctatttttttcattgaattttgccgtcctgactttcataaataatagtgactggaccatcattatttatgttaacattcatgtgtgttccaaattcacctgttttcacagtaagaccatacgctcgtaacgcatcattaaaatactcatatatttttactgcttgatcaggatttttagaatttgagaaacctggacggttaccttttttacatctgcatagagagtaaattgtgaaactgatagtatttcaccattcatttgttggatattaaagtttaatttattattgtcatcttcaaataatcttgcattagcaattttctttgcaattacatctgcatcttgctctgtagagtcctgaccgataccgactaataaacaatatccttttttgatttgattatttaatgtatcattcgtcaccgatgcttctttaactctttgtacaactactttcatattttgcacctctagttccaaactcttgttactgtataaacatcaccaagttgtttgatcttttctaccacacgataaacatcattcacgtttttcaccatgacactaatatttattattgcatttttatcaatatctgaacgacctgaaactttaattaaattgccggctgtcgagctaacagcttgtagtacctcatttaacaagccatttcggtcatacgcagttacctctaaatcaacctgatatttttgagttgcgtcttttgattttacccattcaacattaattagtcgttcagtttcgttcttaatatttgggcaatcagtgcgatgtactttaataccgtgacctttggtgatataacctacaatatcatcacctggtataggattacaacattttgacaacttgataagtacattttctaaaccttctacatagacaccactatcagtaatgatgttgtctttaataggcaatgatttcgtaacttcttgtgcttcatttaaagcacgttgtttatctaaaatacgttgtctttcagttaatttattaacaatctgtaaggatgtcacgccgccaaatcctacagctgcgaataaatcatcttcatttgcaaagttatatttttcattaacaacctgaatatttttctctgtcaaaatatcttcgactctaaatccttgctcttttatttcagattcaaccatcattcggcctttttcaatattagatgaacgatcttgttttttgaaaaaacttttaattttacctttggcactagacgatttaacaattttcaaccaatcacgacttggtccatatgaatgtttactagtacgtatttcaacaatatcgcctgtttgtaaaatatagtcaattggtacaattttgccattcaccttggcaccaatcatcttattacctacttcactgtgaatcgcataagcaaaatcaatcggtacagcaccatatggcaactcaataacatcactcgctggggtaaatgcgtatactttgtcactctgtaagtcatattttaaggtttccataaattcttgagcgtcagacgatgtatgatccgcttcagctaattctttcaaccaatttaacttattttgataagtttgatctttttcacttacttttttaccttctttgtaagcccagtgtgctgcaacaccatgttcagcaatttcgtgcatatcaaacgttcgtatttggatttcgagcgggtctccatttggacctactactgtagtatgcaatgactgatacaaattttgtttaggcattgcaatataatctttaaaacgtcctggcatcggtttccataacgtatgcaccaacccaagtatcgcataacaatcattaatagaattgacaataacacgtatcgccaacaaatcaaaaatttgatcaaattgctttttctgcttcatcattttccgataaatactgtaaatatgtttaggtctaccatttatatcgccttcgatattcattcggtccatttcagtacgtattctatcaatagccgtttcgatatacgcttcacgttcactacgtttcttcttcattaaattgactattctaaaatattgtacattatcaatataacgaagagccgtatcttctagttcccatttgattgtattaataccaagacgatgtgctaaaggtgcataaatttctaatgtttctcgagaaattctaatttgcttttcacgcggcatggctttcaaggtacgcatattatgtaatctgtctgctaatttcaccaaaattacgcgtacatctttggcaatcgcaataaataacttgcgatgattttcagcttgttgttcttcttttgagcggtattttacttttttaagctttgtcacaccatcaacaattcgagcaacttcttcattgaacatttcttttacatcttcaaatgtatacggtgtatcttcaattacatcatgcaaaaaacctgcgacaatcgtcggtccgtctaatcgcatttctgttaaaatacctgcaacttgtataggatgcataatgtatggtaatccgttttttcggaactgacctttatgtgcttcataagcaatatgatagctttttaaaacatactcatattcatctgctgacaaatatgattttgctttgtgaagaacttcgtctgcactatatggatattcgttgttcattatatgatacaccccattcatatttattacttcgccttaaacaatgatttaggtactcttgttgaatagtatttgtcccacaccaatcatacgtccgtcgacgataaatatttatcctgtcgtcattaatcgtaatattaattttacttgagcgagtttaatttgtatactattcctacttttaaaacttttacaaaaattcgacctaaatctactgtttcattttttaaatattagttctatgatactacaatttatgaaataaataaacgatgttattaaggtataatgctcaatcatctaacattttcagtaaataaaaaaatcctaacatctcatgttaagaaaacttaaacaacttttttaattaagtcattcgttcttatacatttgatgaaggatttcatttgataaaattatattattttttattcgtcgtatgagattaaactcataacatcgtaatctttaattttttcaataccatttaaatatttcaattcaattataaatgcaatacctactacgataccgcctaatttttcgactaattttattgctgcttcaatcgtaccaccagtagctaataaatcatctgtaattaacacacgttgacctggtttaattgcatctttgtgcattgttaaaacatttgtaccatattctaggtcatactcataacgaatgacttcacgaggtaatttcccttcttttctaacaggtgcaaagccaatccccattgaataagctacaggacagccaatgataaagccacgcgcttcaggtcctacaacgatatcaacatctctgtcttttgcgtattctacaattttatttgttgcatagccatatgcttcaccattatccataattgtagtaatatccttgaaactaacacctggtttcggccaatcttgaacttctgatacgtattgctttaaatccattaatatttcctcctaaattgctcacgacaattgtgactttatccaattttttatttctgaaaaatcttgatataataattgcttttcaacatccatacgttgttgtcttaattgatatactttgctggaatcaatcgatcttttatcaggttgttgattgattcgaattaaaccatcttcttgtgttacaaattttaagtctaagaaaactttcaacatgaatttaagtgtatctggtttcacacttaaatgttgacacaataacataccctctttctcgatatttgtttcttgtttagttattaatgctttataacactttttaaaaacatccatattaggtataccatcgaagtaaatcgaatgattatgttgcaaaactatataaagttgagaaaattgcagttgttgcagggaattagacaaatcttccattgacgtaggtaaatctcttaatactactttatcagtttgttgtttaatttcttcaccataataatattcattcgcatttactttatcacttttaggatgaataagcacgacaatatttttatcattttctgtaaaaggtaaactttttcgcttacttctataatctaatatttgctgttcgttcatcgcaatatcttgaataattaattgcggtgattgattaccattccattcgttgatttgaacagttcctaatatattaattggctgttcatcttgtaactcaggttctaagtgtccattttgccaaaatagtgcggcgatattactttcaccaagtgtcaattttagatgatttttttgttgacctatcgccttaactgaagaaactgataaatcatccatttcaaaaataggtctagaaaaatctgttccgaagggtcttaaacgattcatatcacgtatatttttaatcgttatatcattttctgttaataatacatccactggctttacgggatctaacgaagttgttttagataattctttcatccatttatttaaaccttcagctaacgattctatattttcaatatccatcgtcatacctgcagccatatgatggccgccaaatttagcgattaactcttggtgtgctgatagtatttcaaacatcgacacttgatcaattgatctggcggaaccttttgcatgattttgctccctatcaatatttaaaattaatgttggcaaagcaaatgtttcgacaattttcgaagcaacaatacctaagacaccttcatgccaattttcttttgctaaaagtaaaaataaatctccatttttaactttcgtttctgccatagccattgcttcttctgtgatagttgctacaatatcttttctttcacggttaaaatgttcaacttgttctgctaaaaatgcagcttcttcttcgtcgtcagtcatcaacaattcgcaagctaatgatgcgtcatctaaacgacctacagcattaagtctaggtccaataataaaaccaattgtttcttcatcaatattgtcattgtatcccgcttcttttagcaatgctttaacagaggtcggacattgattatttaagacttttaatccttgtttcactaatgatcgattttcatcagttaaggatactaagtccgcaatggtacctatcgcaactaatgctttaaaataatcaggtacattttcaatcaatgcttgtgctaatttgtacgcaacacctgcaccacacaattgttggaacggataattaaacgatggatgcattggatgtacgattgcatatgcttctggtaatgtactaccaatttcatgatgatcagttacaatgacatcaactcctaaatcttgaaccattttaatttcattatgaccttgtatgccattatcaacagttatgattaaggttatgccttcatcatgagcatttctaaatgcgagttcgtttggtccatatccttccgtaaagcggttaggaatatgccatcctacttgtgcacctaaaagttgtaatgttgtcactaaaattgtagttgaggtaacaccgtcggcatcgtaatcaccataaactaggattttctcatcattcactatcgctcttttaattctttcaatagccttggtcatatcgctcaattgcaatgcatcatgattgatatctgtgtctgaaatgatggattcaattgcttgttcatcaataatcgatttactttctaatattttttttacaattggcgttaactttaattttgatgttaattcatcacttatgtattcagctggtttagttaatttccacttatacttcggtttaatcatatatatttacgcctcatttccaaaagacattatatctaaaattactttaaataaaaagcacttatctaaataatcaagactttaattataccattttttaaaaatgaatgcgggaacttatttataatatattttgttaaatttaaacaaagtaaaaagcggtatgtgaactctttattgtttcacataccgcttaattcattttaaactaaaatcttttcatcgttcgatttcttttctttatatacaactaatttgtgtttcggcgattttttcaactgacgttttttcattattccccaaagcggaacggcaatgaagattgaagagaatacaccagaaatcaatccgataaataatgctaaagtaaagttgaatatcgtaggagcaccgaagaatagtatagcaactactactacaataactgttaatactgtattaattgaacgtgtcattgtctgtctaattgatctattaacgatatcatcaatttgttctgttgtcgtaatcactttaaccttttgtaagttttcacgtacacggtcaaacgttacgattgtatcattaattgaataaccgacaattgttaatacagcggcgataaatgttaaatctacttcaattctaaataaactgaaaatcgctactataatgaatacatcatgtaataatgccaatacagatgaaagacccatgcgccattcaaatcgtaatgatacatagatgatgatacctatcgatgcatagattaatgcaagcattgcattttttgctaattcctgtccaataattggtgatacagtattaatttgaggtgtgtcaccgaatttcgatttaatattatcactcaatttattatcttgagcacgcgttaaatcgtctttaaattgaacagttgctactttattatctttaccattgatttgaatttgatccgctttaagtccactatcttttacaacttgctcaaccttttgttgagtaattgcttgtttagattggaaatctacacgtgtaccacttgagaaatcaattcctaagtttaacttgaagatataaagaataactaaaccgacaactacaattaaaatacttactccaattaatggcttagctaatttaacaaaattccatttctcgaatgaagttttaaggtcatgaacatctacaccttcattaatatcatgtcgtttattctttttaacaccaaataaccaaaattgatttttgaatatatttgatgaaacaagtaatgataataagaatcttgataagaacacggctgtaacaaagatcattagaatacctaataataacattgtcgcgaaacctttaactgaactttcaccgaagaagaataatactgctgcggcgataactgttgttaagttagaatcaaaaattgttaggaatgaacttttgtttgctttagaaaaggcttgctttatcgttctacctattcgaagttcatccttaatacgctcatacatgataatattggcatctacagccatacctacacctaataccaacgccgctaatcctggtaaagttagaaccccggaaatgaaattaaatgctactaacgttagatagatataagttgtcaatgcaataatcgctactaaaccaggtaatcggtagaatccaagcatgaataaataaattaatgctacaccaataaacgatgcaaacacagttttatctaatgcatcttgaccaaattgggcacctactgagtttgaataaatttctttcaagtcaactggtaaagaacctgcatttaacaattcggcgatttgttttgcttttttaacgccttcttgtcctttaaatccacccgagatttctacgctatcagaattgattggttgatcaacacttgctgcagaaataaatttagggtttttcttttgtgcttcttttttatagctgtcaccttttttgaaatctaaccaaacaaccatgacattatcacgtttcttagagatttcttccgttacttttttaaatttgtttttgtcttttactttaaaagtaactgtaggctggtttgtttcctgtttaaattcttgtttggcagatccctgtttaatatcagaaccgcttaattttactttatcttctgcatcgcgaattgttaaattagcttgagaagataaaattttacgtgcttcattctggtctgttacaccagcaagttgaactctaattctattaggttcttcaacttgaattttaggttccgaaacacctaaaacgttaacacgattttctaatgtttgcgctgttgattgtaaggcttttttatctattttgtcgcctttatttaaaggatcgacttgataaagcacctcaaatccaccttgcaaatcaagtcctaaattgacattctttataacacttttataagttgcagccattccggcaaacaacaatacgactaaaagcaagaacgcaattattctactacttttcttcacatgaacacctcattatttacgtatgtatttagaatacttgaatactattttataacgcaagttaaatctttcttacaaaatttattagccttatacatattaacatactagagcagggagtaaaaatagtcatagatatatttaatttaaatttaacaattattatgtatcacaatttctttttttggaataaaaataagctattctacatactacttataacttaaaaaggatgaaacgctattcgtttcatcctttttaataccacttctcgttatgaagggtcaacttgtttaatagcaggtttttcgaaagttaattcagtaccatgaccattaactgtaataacaacagttgtttcatctactgctttaacagtacctttaataccaccaatagttgtaattctttgaccagattgaatgttattaatcaactcacgatgctgtttcgcacgtttttgttgtggtctgatcatcaagaaatacataaccgcaaaaattacgactatatatattagtaatgaaaattgcattttatacgctcctcttgcttaaaagttttttgggttctcaacatttaatccatattgctcgaagaattcttctttgaaatctaaaagacgatcttctcgaatggcttgtcttatatcttccattaattttagcagaaaatgtaaattatgaatagtagtaagacgaataccaaaagtttcctctgccttgattaaatgacgtatatacgctcttgaatagttttgacatgtataacagtcacaattctcatctaacggtcttaaatcatctgcaaattttgcatttttaataactaaacgaccttgcgatgtcatacaagtaccatttctggcaatacgtgtcggtaagacacaatcaaacatatccatgccgcgaatactacattcgattaacgcatctggagatcctacacccattaaatatcttggtttatctttaggcataaactgctctgtatgttcaaccattttatacataaccggtttaggttcaccaactgacaaaccgccgattgcataaccaggaaaatctaattctactaaatcctttgcactttgttctcttaaatcttcatattcgccaccttgtataatgccgaacaatgcttgatcttcaggtctttggtgtgcatctagacatcttttcgcccaacgtgttgtacgttcaatagatttttttacataatcatattcagcaggcatcggtggacattcatcaaatgccatcataatatcagatcctaaatcattttgaatttgcattgatttctcaggactcaaaaataatttagacccattagtatgatgtctaaattccacgccttcttctgtaattttacgtaaattacttaaactaaacacttggaaaccgcctgaatctgtaagaatcggaccatcccaattcatgaatttatgtaatcccccagcgtgtttgataatatcatttccgggttgtaaccacaaatgatatgtgttgcccaaaatgatttttgcttcaatttgtcttaactcttctggactcattgttttaacggttgctttagtaccaactggcataaacataggtgtttcaaatgaaccgtgtggtgtgtgcacgatacctaaacgcgcacctgattgtttacaagttttaatgtgttcgtatgttactgcaggcatattcaaaatcctcacattctttttatataattaacattgcatcgccaaaactaaagaatctatattctaaatttactgctgttttataagcattcagaacattttcacgagtactaaacgctgatactagcataactaatgttgattttggtaaatgaaaattagtaatctggccatcaattgctttaaaatcaaatcctggataaataaatatattagtccagccactcgtttcaacaaatttatcatgatcgcgtcgaattgtttcaagtgtacgtgttgaagttgtaccaactgatataatgcgatgtcctttggacttagtatcatttaataaatcagctgtttcttgtgtcatttgataatattcactatgcatttcgtggtcattcacatcatcgacgctcaccggtctaaacgtacctaacccaacatgtaatgtaacaaatgcgatattaacgcctttatttttaatttcagttaataactcatcagtaaaatgtaatcctgctgttggtgctgccgctgaaccactttctttagcgtaaactgtttgataacgatctggatcatctaaacgttctttgatgtatggtggcagtggcatttcccctaattcatctaatctttcttgtaaaataccttcataatgtaaacgcatgatgcgtccaccttgatccatttcttttatgcactcagctataattttgccattaccaaaattcaatttattaccaactttaatacgcttagctggtttcagtaagacttcccaatcattaccttcaatttgagttaacattaacatttcaacttttgcaccagtttcttcttttaaaccaaaaagtctagctggcattactcgcgtatcgttaagcactaatgtatcaccaggtctaaaatactcaatgatatctttgaaatgtaaatgtttcatttcaccagtttctctatccatgactaataaacgactatgatcacgatcttttaaaggcgtttgagcaattaatgattctggtaagtcatagtcaaattcttcaatattcacgttatcctctctcctcattcgactttgcaaaatgttcataagctaatggtgttgcttttctgccacgtggcgtacgttctaaaaagcctttctgaataagaaatggctcataaacgtcctcaattgtaatacgttcttcaccaattgttacggcaatcgtatctaaaccaacaggtccaccattatactgcttaataatacagttcatcattttatgatcaatgtaatctagtccgtgttgatcaacttgaagtaaacctaatgcgtgcttcgttgtttcaatgtatatttgttcatcttcattcacttgctggaagtctcttacccgcttcaatagtcgatttgctactcttggagtccctctagaacgtttagcaagttcaatggcactttcttcatcaatacctgtgcctaaaacctcagctgttctaataatgatttcttttaaatctgattcattataatattctaatcttaagtgcacaccaaatcgatcccttagtggacctgttaagctgccagctcgcgttgttgcacctaccaaagtgaatggaggtaagtcgatacggatacttctagcctcatcgcctttaccaatgataatatctaaaaagaaatcttccattgcagggtataacacttcttcaacaacactactcagtctgtgtatttcatcaataaacaatacatctccaggttgaagtcctgataaaattgcagccaaatcaccaggtctttctaatgaaggccctgatactgtacgtatattaacttccatttcattggcaatgatattagataatgttgtcttacctaatccaggggggccaaaaagcaatacatgatctaatggttcatgacgaagtttagccgctttaataaatacttctaaattactttttattgaattttgaccaatatattgtcgtaatctcgtaggtctaagcgacaattcgaaatcagtttcttcactatgcattgattgatcaaccatacgctcattcatgacaacacttcccctattaatctatttaaaattaagatacaactaattgaagacctgccttaacagcttcatcaactgagtcatatttatttttatttaacgttttctcaacttttgcaagctctcgtttagaataacctaatgcttctaacgctaacattgcttcttgcacgaattgatcttgcaccgtcgaagtagcgtctacttgtaataatgaatcgctatcttcttcagtgattttcactttaccttttaaatctaagacaatctgtcttgccgttttcttaccaattcctgggaatttagttaaatacgtatcattttcattttcaatggcacgttttacttcattaggcgtacttgtcgctaaaatagctaaagctgatttcggaccaataccagtaactttaattaaactcaagaacatatctttctcttcttcactactaaatccatacaataattgtgcatcttcacgaacaattaaagatgtacgaattaaaacttcatgatctagatgcttttgaaaacgataagaatttggtgtttgaatttcataaccaacaccagcagtttcaacaactacgtgtgtaggatataaatgtgttaacttacctttgacatacgcgtacattataggcacatccttacatactcatactaattaattctacttttgatacataatctaaatttctcaaagcaccaataacatcttctactgaagtttctttagatttagcattcagtgataatgttattgttgctttttcttccattggaatactttgatgaattgttaatacagatagttctaactttgatataacatctagtacacgtgccaacatacccacaatatcagttacatataaaattaatgtaaattctcgatggtcaagcattttatcgtctactggaaatatcgtttctctatatttataaaaagcacttctagatagatcaaactgtttaacggcatcataaatggacaatgtcggatcactttttaaggcatctttaatcttcaatgttttaaccacggattcaggcaagacatcttctctaattaaataaaactttttataatctttattgtccatcatgttacgctcctattcaacgaattcaaattctccgccaagaattctaacgatatcaccatttttacaaccacgttctctaagtgcatcatcaatacccatcgaacgcatttgacgagcaaatcgacgtactgctggatcactgttaaagtcagtcattttaaacattctttcaatagcattaccacttaccacataagcaccatcatcatctcttgaaattgtaaatttatcttgtgacggtgtatgtttatataatactcggttaatgccaactgactcctcttcttcaactgtgaagtcaacatctttatattcttctaatttatctgctattgcatataataattgatcaatattatcacgcgttattgttgaaactggaataactggcacatcttcgccaatttcttctttaaacaagtttaaattatcttgtgattcaggtaaatccatcttgttagctactacgatttgaggtctatcttctaaacgttgctcgtacgcagctaattcttgattaatgactttataatcttcaataggttctctaccttcagaaccgctcatatcaatcatgtgaacaataacttttgttctctctacatgtcttaaaaattgatgtcctaatccaacgccatcagatgcaccttcaattaaacctggtaaatctgccataacaaaactacgttgatcaggcgttgaaacaacacctagatttggtttaatcgttgtaaaatgatatgccccaattttaggcttagcttttgaaacgatagataataaagtcgatttacccacactagggaaacctactaatcctacatcagctaataatttcaattctaaagatacatctaattcctcacctggttcacctttttcactgaagtcaggtgcagggtttctaggtgttgcaaaacgtgaattacctcggccacctcgaccgcccttcgctactacagctctttgaccatcttcaacaagatctgctaacacttcgtctgtttcaacatttttaataattgtaccaggtggaacttttaatactaaatcttccgcatttttaccatgcatattactactttggccattttcacctttgcttgctttaaaatgacgttgatatctaaaatctaataacgttcttaaaccttcatccacttcaaatacgactgaagcacctttaccaccgtcaccgccagctggtccaccaaatggtacatatttttctcttctatatgcggtaataccattaccaccatcaccggctttaagagatattttgacttgatcgacaaacatatatctcacctcttttacatataattttcattttcccaataattatagcatattagagccccttatatattgtaaataattaggggctcttatgcagttgtacatttagtataacgtctaaaattcccattttttaataacataattaaaataataatgaaaaaccttttataaaaagtaaaaaacaccagaagattcacttctggtgttaactagacaaaattattcagctactgcatatacagaaacttgttttttgtcgcgacctttacgttcgaatttaacaacgccgtcgattttagcgaataatgtatcatcgccaccacgacctacattttcaccagggtaaattttagtaccacgttggcgatataaaattgaaccacctgttacgaattgaccgtcagcacgtttagcacctaagcgttttgattcagagtcacgtccgttttttgtagaacttaccccttttttagatgcgaagaattgtaagtttaattttaacatcggaatgcacctcacttataatttaatctaatattctcattatattcttcttcaatagtttgtaaagacacaagcattgtttgaagaattagttgcgcttcatcgttatttgtatcaacgcttcttatatgaaaatgaccaccattgtcgtcataattgatatctggtctctcagatgtcaatcctataatcgcattaacactaccaaacaatacagctgaagctccagcacaaacgatatcatgaccatattcaccatggtcagcatggccatccataataacgtctgttactttgccttcatcattaactgtaatatcaacagtaatcataataattacgcgttgattttatcgattgttaatttagtgtatggttgacgatggccttttttacgttttgaatttttacgacgtttgtatgtgaatacagtgatttttttaccgcgaccttgtttattaacagtagcagtaactgttgcaccttcaactgttggcgctccaactttaactgaatctccacctacaaataatactttatcaaatgtaaaagtatctccttcgtttacgtctaatttttcaacgaagatttcttgaccttcttctactttgatttgttttccacctgtttcaataatagcaaacatactttgcacctcctgtataataagtcacgccatacataggtgacatttcgttattgagtcaagcgtttgcactctacgttgtttcggtcgcaactcgagtcatttataaacataaactcttctcgtttcttccttcaacgccttgattgacaatcgctttcttcattaaaaatgttcttgaacctatatttgagcggttgtatgtagctacttataactactcaactattgcatcttaccattgacgacgtttcatgtcaatgtcattgtttgtttttttaaggaactttataatcaacggataaagcataatcaacagtacaaaattcataattaatgttggcaataatctaaagactacaaaatgaataatatcaaattgaatgaatcctaacataccgtatattaatgccacatagacttctaataataaggtgctggctaatataataatgaataacatcgaatgatctttgtaaaaaattttaaagaatcgatctataagtgctaaaaacaatatatagccaaataagtacactccataaatactaccaaagtatacatcagtcattacgcctaaaaatatgctgagcaataatgatacgccaaagccacgatacactaccatcattaaaatatacataaatgtaaggtgtggtacaaatacaagttcaaacttacctatatgcattggaataagaagcccaattgcagtatctatataaaatagtaaaatacctatcaaaaaataatacagtgtacgcattatttatccctgctttcatcatcaggaattgttttaggatctctttttgcaacataaacatgactcaaatctgttaagtctgcaccagtcttaaccctaacttctttagctaagccgtattgatcattttgaaccttagtcacttctcctatatataaattacttggtagttgatcagctaatccacttgtaacgactttatcaccttttgagatattatctctattattaatgtcactaattacaagttctgagttcttttcatcataacgatcaattaaaccaaatatatttttagaaccgtgttgtatatttacagataatttacccgcacgtgtattagttgagattaaatcaacttgtgaagaaaatttattaactttagtaactcttccaacaaaaccttgtgatgtcatcacagccatatttgaagttatacctgatttagatcccttatcaattacaattgtattcatccactgatccggatttcttgctaaaaccgtagtagaaataggatcaaattttgaaatatcttttaaatcaagctctttttttaatttttcattttccgcttctaattgttggttcttagattctaactggctaatcttatttttagattctttagaatctccttttttaaaaaagtccccaatcgtaccagcaacaaaattaactggataactcacaactcgttgtccaaaagacacagaatcacctatatattgttcaggaggtgattgagattgtgaacgtatggacagcccaattaatgcaataaaaacgataattgcacataaaacaacaattaatttgttatttttaaaaaacttaagcacccagaacacctctattatgtcaaaatattgtatatccttttctattttatattactcccattatgaaataaagcactaactacgaattactttgaaaatgaacaactccgtaaaaaatttgtggcattttaaaaacaaaaaactactagcaaacattccagtcactagtagtttaaataatcgatttaaattttaaaattatttgtttgtatcgttcgaggattcactgttcgaattctgaagttgtctccaacgtgcgaataaattctgggccttttgttgttcattagcttgtttctgttttgattgttctgccatttgaactacaccaaccttttaaatttattctagtgacaggataactaaaatatatttcttatgcaataatttcctattgataagcattttcgggttttagttgtaaattttgccctaattcatttaagtcttgttgcatttcaaattcagtattgtaaacacgcattgactcatctccaaatttataaagaataaattcgtctcctctttgacctataatatattgatcattataagccatgcgattcattccagacacagccataaactcttgtttatctatcattttaaatacatttttaatttggcttaatggtacattctttattaaatcattttcttttaatgaatatttctcaccacttacataaacatgttgggcatcattagtgggttgcgtaacttgattcatttgatcattatcgtgatttacaggattccaatcttgttcttttaaaaaaggtgcgtatttcaaggcgatataaacaattatcacaattgctattactgctataatgtttttaatcatactaaatatcaatctcatagttcgcctccaatgtcttcatctaattatatattttattatgtatattttcctcagtcttcagccttaatcatgatatatcttaggactgatgcacgttcatttaaaatagcttataattttgttatgatttaaaagcgtatgaggaggtttgtagcattgagtatactaacaattattttaatagcactattagtcatcctcctttttagagttggactttctattttgcgatttttaatttatgtcggacttgttttattatgtatttacttaggatatcaaggtttaatttggttgctcgatttttttcaaataaatagtgggtttttaccgcactttcaatttaacaattaaatttattctgcataacaaaactcctaatgtactagtttagaattttttaactagttccacattaggagttttaatttggtttcaagcacggatactacttgatgaacagattactattacttacgcccaaatgcgttagataaaaatcgtatcagcgcgtagctaccacttagtaaaaggccccaaacgattccagtaaaaattgagccgattgctacacttaataaaggaaaagcttgtttcgtaacgatcacacctgctaacgccgttactaaaatacctaacgtagataaagctaatgttattaatagattgcgctttgttacaggttcatttttaatatttaactgcatggtataaaccattggcacgagaaccccgataataataaatagagtcactatttttcctccaatgaaagtacttcgtaggtattatacacaagatacgtcattaattctatcaacttcaatcattttcatcaaagtaacccgcttctacaagactggtaaatctattatcaccgattataatatgatccaataaatctatccctaaaatcaaaccacactccttcaacctcattgttgttatgatatcttcttgtgagggcgttacatcttatcaagagtaaattacaaaagaatcatttaaatcaatactttcactttgaatacatgtatttgaagtggaaggtacttatttcaaaaatagtaaaacctgtatcttaaattacttaatagtaacataagatacaggctgattttttattcattgttatttatactaaagcacccgatagctctgaaaacaatcacaaattcaacttttcaaagccacagctttaagttattttgtccagacaacccccattgcccaacccattttatggaattggcatccaggcaacaacttttcatataaatcgtaataattttgttcagataggtacttatctgaagctaaatgctcaagccatgatttagatgtgttgtgattataaattctaatcgcattttttattccaaatttgaaacaatgcggtaaaaactcttggattgcccctaatttataaacataggtaggcggtgtctcgacttcagatacattatcaagaataactattcttccttcctcattcaacagttccttcatttgctgtattacgctggctatatcatccaaatgatgaaaggttgttcggcttacaataaaatcaaacttctcattaaaattaagttgttctgcattcatattcagatagaccgtatttgttagttgacgtttagatttggcaagatcgagcatttgattagaaatatcaatccctaccacttcatcataataacttgctaatttctccactaacaaacccgagccacatccgatatctaatgctctgcctttctttggagacatattagacacaaagaatgaataatcattcaaaagctcattcacgaaatcgtaatcttctgcaaccttatcaaactgtgattctattgtattcaaaaagatcccccattcctactttatcgacattctttcattacttaccactttagatgttttttcgttggggataaaacttccctttagacaattttatccaaagacaatacaacagtgcaactttattaaagtcactgtcctttatcgcagcctttactttttagtaaagacagtggcttctcttatcaagtttcaaaacatattattttgaagaaaacgtccatctgaagtgtcaagtgcaaaattacatataaaggtttattctaaaatgaaaagatgatacaatcatattcagttacataaggaggtttcaattatgtgcaccagtatcgcagtagtagaaattactttatctcattcataatgaaaaaaatggaaaggagataaaagtatgggtactttttctatatttgttattaataaagttcgttatcaaccaaatcaaaattaattggttataatgaacgcttaatgtcagttcattataaccagtaaggagaaggttataatgaaccagtaaggagaaggttataatgaaccagaaaaaccctaaagacacgcaaaattttattacttctaaaaagcatgtaaaagaaatattgaatcacacgaatatcagtaaacaagacaacgtaatagaaatcggatcaggaaaaggacattttaccaaagagctagtcaaaatgagtcgatcagttactgctatagaaattgatggaggcttatgtcaagtgactaaagaagcggtaaacccctctgagaatataaaagtgattcaaacggatattctaaaattttccttcccaaaacatataaactataagatatatggtaatattccttataacatcagtacggatattgtcaaaagaattacctttgaaagtcaggctaaatatagctatcttatcgttgagaagggatttgcgaaaagattgcaaaatctgcaacgagctttgggtttactattaatggtggagatggatataaaaatgctcaaaaaagtaccaccactatattttcatcctaagccaagtgtagactctgtattgattgttcttgaacgacatcaaccattgatttcaaagaaggactacaaaaagtatcgatcttttgtttataagtgggtaaaccgtgaatatcgtgttcttttcactaaaaaccaattccgacaggctttgaagcatgcaaatgtcactaatattaataaactatcgaaggaacaatttctttctattttcaatagttacaaattgtttcactaaattaaagtaataaagcgttctctaatttcacaagaggacgctttattcttcccaaaaattgttcaatatttatcaataaatcagtagttttaaaagtaagcacctgttattgcaataaaattagcctaattgagagaagtttctatagaatttttcatatacttaacgagtgctttcacctttgaatatagtccttcccacttatcatcacactctccccgatagccttttctagctatatccagtaaagttacatgctctttaggtaaaagaggtatagcccattctgcagcgacatctttcgaggtaatttcaccagtagtcactgtttgccacattcgagctagggttaaaattacattacgctcatcaccttttatcccctcaattagttctggcaaagaatccttaattgctcttcgaatatctgtcaaaggtacggagacaagtatacttgaagaatcaggaccaaatagagaaatactattctttcttgcttgtgctaaaacaatagccaaatcaggatcatagcttggttcctgaatttgtccattctcaaattcacccctgagccactcaccgtatataaattctctttttggaggatattgccaagggacaacttcactcctatttataaccgtaacttcaagtggtctaacagaatccgtatttccaatctttcctgatatagtcattagtctttctgttagtttttttcgagttaattgaggtaaactatgattcacgacgactagaacatctacatcgctgttaatgcgtaaaccaccatttactgctgaaccaaatagatatactccaactattgaacttccaaataaatcttttacgatttttaatgtttgaatcgcttgatttggtatttttccgttaatcaaattgctcatgatttcacctcgttgattatgttcatataaagtttatattgatactcaatttacttaccctagattggacatatacttaaattactgttcaataaagctgaccgttagcgtttaagtacatcctttcacaatttgtctacagattaataattattctttattatacagatctccatataatttttgaatttggttctgtaattttttattttctttttctaattccattactcttctttttaaggttttaataaggatttcctccgaacgagaacttttcttgggttttgagactacatttgctgttatttgacgctcacgaagggattcgattctttgcctaatatcgtgttccttataaagccatgatttagaaacattagcttcctttgctattgaattaaaattaataactttaccttcaatcgaaaatttagaaatcgctttgtctactttttcccttgtcttttttgatttctgcttcgccaaacgtacaatttctgttgtatttctaacttgtttatccattgataattaccccgtcaaacttccaatgatttgttctaaacgctctttaacacggctattagtctctacttgtctttgccattgtttatccttagctatggctaataactcttctgtacgctctaactgttcttcgtgctgtggtaagaattgcttactggtacagaagtgagtgcaatctaagcatgcattcgcatgtggacaaccacctgctactactggcaatctacaataaccatttggaagcacttgtgcatttatatttttcttgaaccattgaagctctacatcatcgacttcattatcttcatctagatcaagcacatctccattattggtaaccagtttttcctgaaatttagtaaattcattttttagagtttcatcaaagatatgagcgtatctgcttgtcatttctgggctttcatgccccaaaaatttctgcacaatatgctggggcatcccgttgttaatcattcttgttcctactgtatggcgaaaggcatgggcatggaatctataaatctcacctgatttatccactatattttgctcataagctaatttatttaactcacctctaaatgtttcttgttttaatggcgatccatcttttcttggaaagaggtattcactatctggaaattcctctgaaactttatcttcccgaactttaataagtaaagctacctctttagatattggaactatatgctcctttttcattttccattgataatactttaaaaagaaatctccatctttgtcctctaatagacagccttttttcaaggtgcacaattcacttatcctcattccacattcttgaacaatcatagtcatcgtagctatatattcgggtaatttatcaagatgactgttcaattgctctaggacgaattcatctataaagcgtggttttgctcttggtattttcggatagtcctcagaataaattaatattttggaaggaacatcatcccattctagcctaagaagggtactaaatagtccttccaatatagagatcctcccagttattgtactaggttttattcccatcatgtttagttcacttaaatatgcttcaatttccactctcgttaattggtgtactctctgaacttgtttaaatttcatgtccagaaaattaaagaactctttaagtctttgggcaatatcacttacataggaaaagctatccacgttcaatctcaacttacaatatctttttacaagttgtttaaaatatgtattccgaaaccctttaaagttaattgtatattcatattgtgttgggttaaccttatcatctggcaaaggtaagttacgtctatcccaaacgtctttatcccactcctctccatcaaaataaaagttctcataaaactccataaattgttttagattagtaacatagtaggaattagcttttacaggtgttttttcttgattagcagtaatcttataattagtagtggtaattctaacaccccgttttgtcaaataagttctatactccgtcattgctttttcaataggaacttcagtaattgaagtaatgctaggatactttaaatctaagaaatctaacattttattaattactgttccttttctaatccagacagtttttgcattccatattccattgtttaaatggtaaaaataaaaatatttcaattctgttcttaaccacagatttttaacacgttcaaaacgaacccaacgattccttaaagcaggattcttacttaattctatggcagaaggatgtggacattttcttatatcccaactattattagcccaaaacccctgcatttcttcattcattacagctatttttttgctaatctcactctgactaataattttccttttactagaagcattcatttcttatgctcctttctctcgaggtatttattaaactcatttttcatatcctgatctgaaagatgaacataggtatttaacgttgtctgaacatgtgcgtgacctaatctcttttgaacgaacgcaacatcccatccttccctaattagctgcgttgcgtgagtgtggcgaagcatatgtgatgtaaattctattccagtccttttaactattcttctaactagatcaagaacactttggtactttagtggtttcccaaaatagccttcttttaaggaaataaaaacataatcatgctccaattcctcactatactcatatatcaagtaatctgtataaagtgacataagttctttactcacatgtattgttctttccttccttaatttaatataagcttcattaacattaacatctctaggtgttaaatggatttgattgtcccaagtgacaatatcttcaagcctaagcgataacacttcaccgattcttaaaccaccctcatacataagcattaaaattaatttatctcttttcgtatgacaagcatcaataatttgcttaacttcctttgatctcaatgttcttatctgtttctttttaacccttaactttaagacattcttttggtatctacccttattaacatgatgtaaaaatcctttgaaatttcttccctttgcttgtttaaatacatcaattgatttaaattctcctaatctacttaaataatcaagaaaactcataactacatttaaaattgtattcactgtcgtttcttctcttatggctttttttgactgaagatcaattacatttgatgctgaaggatatctcaaccaacctacgaagtctgctaacaactcaaagttaatatcattaagaataacacctctctgttccatgaactcgtacagcaactttaaatgatagcagtatgccttaatggtattaggagacttaccagtattatctaagtatttaataaatttcattactggttctattagctggtattctttatctagtaataaatacaatggatacggcttattctccacttctatcctttgaaccttcacatgttcccacctctttaaatactttaactactacaaattataaaccttgttaatttttatttaaagtaaaatatccctttaatatctcctcttaaactactttaactactattatttattatactatggttaatacatcaccggatggatgattatgaactgcgatgattgcattggcattttctctcaccgcaatactaaaaatttcacgtggatgtacaatcgaactatttaatgtacctttaaaaacacaggtttctttaatcactacattttttgaatttaacaataaaatgacaaaatgttcttgtgttaaatctttcattgttggaatcatataatcagcaacatcacttggttgcgttatttttatacgattattttcagctcttctccccatcctttcccctaactcaaatgctgcttttaaagtaattgctttttgtaatccaatccctttaacttttatcaaatcgttaattgaagattttttcaattcattcagattcgaagcagatttaagcagttcattactaatgtctatgctcgagaatccttttcttccggtgttaattaatatagctaataattctgtattcgaaagactttttgcaccatggcttaacaaacgttctcttggcatttctgaagttaccatttctttaattttcaaaaatatacgcctcctaaaaattgatggatatcattataaaaaagtgaattgataaaaaaggaaataaatataaatggaacaaggggtaatagtttaatcggcttaaatatcatggtaattaaagcaactaaaccagcaatgacaaatgtaaataaaatgacataaatagtgaattggagagggaaaaacaaagaaagtgcagatattagtaaaacgtcaccataaccaatatatgcccgaaataaaaagtagaatatatgcgtggtcatactaataatgataaaagctactggataaatcatacttaacgagagagaaacgatacaataaattataattaagcgacaatctaacattaaagaagtgatatcggtcatagtaaaaataagcagaaaaacatatgtagttataaatagcgtagcatttacgtatgtgaaatcatacttaataaagacgataggtattaaagcaaaggtttcccctaagaaatgtgttagggaaatacgctttcgacagtttcgacatcgcccttttaataataaaaaactaataatcggcattaattcataccatttgagtgacgaattacaataatcacatttcgatcttctatgtaaataatcaaatgacgtttcttctatagatataaattgatatagaaaactaaaaatacaactgcagctataagataacaatactaccaaatgacaacctccttatgtaaattatagttagttattaccaaaatgtaaatatacactatttttcaagaattgaaccgctttttcatttaaatttttcaatattgctaagcataattgatggatactttaacaacccattactgctcggcaaaattaataatggcaagaaattgaaccttataaacacatacgatttagagcataaaaaataaccatgaagctctacctattgattaaatagattcttcatggctattttagttttagttttataatgcttcaaagtctaattttgatttaacttcacttatgaaatacagactaccggtaattactaatgtatcaccttgataattttttataaattcaacgtagtcatctactaattgtatttcatcattttcaatactacctacaatttcttctttgcgtaacgctttcggaaaatcaaattcagttgcataaaacgtatgcgcaattaaacttaaatgtttgaccatctcgttaatcggttttccgtttattgctgagaacaaaatatctactttttctttatcatggtactgtttaattgtatcaattagagcatctatactctctgaattatgtgcgccatccaaaatgattaaaggtttgtcatgcacctgctcaatacgtccagtccaacgaactgattcaataccgtctatcatcttattgaaatctaattcaattaatccttgttcatttaattcaataagagctgttatggctaatgcagcattttgtttctgatgttcacctaacatgcttaaaatgattgtttctaattcataatctttataacggtaagtaaattcatcattttgcgatacaacaacaatttctctatctaattcaattggctttgcatgttgttcaattgcgcgttcacgaacatattttaatgcatcttcatttttaacagcatatatcactggaacgttaggctttataatcgcgcctttatccctagcaatatctagataagtaccacctaaaatatctgtatggtctagaccgatactagttaagattgataaaaccggtgtaaagacatttgtcgaatcgttctttatacccaatccagcctcaacaatgacaaaatcaacaggatgtatttcaccaaaatataaaaacatcatcgctgtgattatttcgaattcagttgcaacacctaaatctgtttcacgttccatcatttcacttactggtttaatacgtgatactaattctacaatagcgtcatttgatattggcacaccatttagactaattcgttcattaaatgtttcaataaacggcgacgtaaatgtacctacttcataaccattttcaactaaagctgttctaaggtaagcaactgtagagcctttaccatttgtgccacctacatgaatacccttaatgttattttgaggattattaaattgtgctagcatccattccatacgtttaacacctggtttgatgccaaatttagttctttcgtgtatccaatacaagctctctaggtaattcattgttactaactcctatgcttttaattgttcaattcttgccttcacaccatcatatttttcttgataatcttgttttttacgtttttcttcatttataaccttttcaggtgctttacttacaaagttttcattagagagctttttatctactctatctaattcgctttgaagtttagctaattctttttccaaacggctgatttccttatccatatcaattagcccttctaatggtaataccactttacctgcaattacaactgatgtcattgctttctcaggaatttccacgtcagtgctaatatttaaggtactaggattacagaatttgattaaataatctttgttttgtgataaagttgtttcaatttctttatctttagcttgaattaaaataggtatttctttagacaatggcgtatttacttctacacgtgattgtcttacagatttaatgatttcaacaagttgttgcattgtttgtttactttcttcaaaaatcaatgattcacgcacttctggccatgaagctttaacaattgtgtcaccttcatgtggtaaactttgccatattttctctgttacaaatggcatgaatggatgtagcattctcataatattgtctaaagtataactcaatactgaacgtgtaacttgtttttgttcttcatcattactattcattggaattttactcatttcaatgtaccaatcacagaaatcatcccaaatgaaattatataatgcacgtccaacttcgccgaattcatatttgtcacttaaatcagtaactgttgcaatcgtttcatttaaacgtgttagaatccatttatctgctaatgataagttaccacttaaatcgatatcttcaactttaaagtcttcaccgatattcattaaactgaaacgtgccccattccagattttattgataaagttccacactgactcaactttttcagttgagtatcttaaatcatgtcctggagatgaacctgttgctaagaagtaacgcaagctatcagcaccgtattcgtcaataacatccattggatccacaccattacctaatgatttactcatcttacgcccgtcttcagcacgaactaaaccgtgtaataatacatcattaaatggacgacgatctgtaaattctaagccttggaatatcatgcgtgcgacccagaaaaagataatatcgtaacctgtaactaaggcatttgttgggtagtatcgtttaaagtcttcactttctaaatcaggccaacctaacgtagagaaaggccataaagcacttgagaaccacgtatctaatacatcttcatcttgttgccaattttcaatatcagttggcgcttcttctccaacatatatttcgcctgtttctttatgataccaagccggaatttgatgaccccaccataattgtcttgaaatcgtccaatctctaatattttccatccattggttaaatgtatgttcgaaacgttgcggataaaaatcaatacgatcatctgttttttggttatctaatgaacgtttcgctaagtcttccatgcgcacaaaccattgtgttgataaatatggttcaacaacagcgccagatcgttctgaatgacctacagaatgaacatgatcttcaatcttgataactaaatcttgttcttttaaatctttaactagctgtttacgacaatcaaaacggtccataccttcatatttacccgctttgtcgttcattttaccattttcatccataacgataatattttctaattgatgtctttgaccaatttcaaaatcattagggtcatgtgctggtgtcactttcatagcaccagaaccgaagtctatatcaacatactcatctgctaaaataggcagttcgcgtcctacgattggtaatataacagttttaccgattacatctttgtatcgttcgtcattagggttaacaacaatcgctgtatcacctaacatcgtttctggtcttgttgttgcaatttcaataaaaccttcaccatcagcgtaaggatatttaaaatgataaaacgcaccttgaacatcttcatgtattacttcaatatcagataaagctgtacgtgctttaggatcccaatttataatacgttcgccacgataaataattcctttattgtataaatcaacaaaaacttttttaactgctttacttaaaccttcatctaaagtaaaacgttctctactataatctaaacctagacctaatttagcccattgcgcacgaataaatgacgcatactcttctttccaatcccatgcctgttctaaaaacttttcacgaccaagatcatatctagttattccttgttcatttaatttagcttctacctttgcctgtgtcgcaataccagcatgatccatacctggtaagtataacgtatcgtatccttgcatacgtttcatacgtgtaatgatatcttgtaaagtcgtatcccatgcatgtcctaaatgtaatttaccagttacatttggtggcgggataacaattgtatatgtttcttttgatttatcttctgacggtttaaaataaccattctttacccattcttcataacgtcccgcttcaacttcacgaggatcatattttggtttcatttccatttgctatacctcctaaaaaaataaaaatatccatcctatatacaaataggacggatattccgtggtaccacctatattcaagaaggatgtttaatatcaaattcactcttttaacataattggaataatcataccaatactatcatcgtgaaatttgaaatgcttcatctcttcaagcactctagattatgattaacgctcaaacacgtcttagcctactattaatcacgttcagctaagatactctgtgggctaccttcagtaaaaatcatttacatactcacaccaaatcatatgctctctttaaaataatttgaacttactcttcccaaatcctatattaaactcttaacttatagtataatgattgacaaaataagtcaatgtataggtgggaataaaatgaatgaatgcgcatttggtactaaagatccagtctacttaaactatcatgatcatgtatggggacaaccgctctatgatagcaaggcattgtttaaacttttagcattagaatcacaacatgctgggctatcttggttaactattttaaaaaagaaagaagcctatgaagaagcattttatgatttcgaaccagaaaaggtagcacaaatgaccgctcaagatatcgaccgcttaatgacttttccaaatatcgttcatcatcgtaaaaaattagaagcaattgttaatcaagctcaagggtatttaaaaattgaacaagcatatggtagttttagtaaatttttatggtcttatgtaaatggtaagcctaaagatttgcagtatgaacatgcttctgatcgtatcacagttgatgatactgcaacacaactatctaaagatttaaaacaatacgggtttaaatttttaggtccagtaacagtattttcgtttttagaagcagctggtttatatgatgcacatttaaaagattgtccatcaaagcctaaacacaattaatttgctatagcatcataaagtaaacgagacatcatctatttttaactaatagactgtctcgttttttgatgtgaaaatttattcaaatcataagttaaagttccaagttaatgcactgctaatattagatatcttaatctaaaaatagatgtacaacctttgcttaaaccttaataatgaattctatcctaagcataattcaacttaaatggatgatagtttctaatcttcacgcttattcgaacgatattttaaaaagtaattaattcctggtgcaataataaataggatgaaaaagattcggaaaatatgataactcgtaatcatagcaacatcggcaccagtagctaatgcaactaaaactatctgattaacccctcctggtgctgcaccaagaaacaattcattaataggattattatcaaagaaatgtatgatataaaccatgattagcgcaccaattatcaacataatattttgaattgtaattgcgattgctagtctaccttttaaatctgacaataaatgcgcaatttgaactccaattctaatcatatatattagttgtgccatgttcaacaaccaatgatctagtgtaaatgttaaacctgtagaaaaattccaaacaattaatacaatgagtggtgctaataattgaaatgttggaaactttattttagacataattagataaactataaagatagctatcgctaaaataactatttgccctatgtttaatacttgtgataaaggcaagacttttgttaactttccattcgcatgcatgttaccatcatgaaaaaaatatgaaatgaacggtactaaaacaacaacaaatataattcgtgatgtttgcgttaagctaacaactaacaaattagcacgtttgtcttgttcagccatgaccagcatttgtgttagtgctcctggtataacacttaaaatagctgtttctgtattaatacgtgcaatttttttaaaaataaatgccattactattgcaattaataatatcgaaatagatacaacaataatcgaaagccaattgtttttaatatccataacgacatttttcgtaaacgttgatccgatttgcacccctaatagtacaatccctaattcactaagtaagaatggccatttaatatcaagtttgaaaactttcacacaaatgattgatgcgataataggaccaaacataaatgggagtaatacgtgcgatgaatacaatataatactaataaaaaatgataaaacgaacacaatgaaattatttctatatatcattgtcatgttttccacttctttcaataaaaaataaaatgactaaattgctgcttgagcttcacgtttgttaagataacaatatccgctagcagttttgactacaaagcatatatggactttcactatcaagtcgccgcccatgcctgatatacatttaaaaagagcctgaacaaagttcaggctctcaatttgtccgtatatttattttacaatacgacttaaagccgtatcaaatgcttgaatcgttttttcaatatcttctttcgtgtgtgccgtagataagaatgtaccttcaaattgagatggtggtaaaaacacaccttcttttgccatttctcgatacatttctgcaaataatttcaaatcacttttattcgcttgttcaaaattagttacaggtccttcatttaagaaataaccaatcattgaacctgctctatttacagttattggtacattgtgtttagcaaatacacgctttaaaccgtcttcaagtatatcgcctaacatattaaaatactcatatgtctctggcgttaattggcttaacgtttcataaccacttgtcattgcaagaggatttcctgataacgtacccgcttgataaatatttcctaatggtgctatatgatccatgatttcttttttaccaccaaaagcacctacaggtagtcctccaccgataacttttcctaagcaagttaaatctggtgtcacaccaaagtaaccttgtgcacaatgataaccgactctgaaaccagtcattacttcatcgaaaattagcaatgcgccgtattcagtcgtaatatctcttaatccctgtaaaaaaccttcaatcggtggtacgacacccatattaccagcaacaggttctacgattacaccagcaatatcgtctccaaatttttcgaaagcgattttaagtgcatctaaatcattgtatggaactgtaattgtatttttagcaataccttcaggcacaccaggagaatccggcaatcctaatgttgccaccccagaaccagctttgattaataacgaatcactatgaccatgatagcaaccttcaaatttcacaattttatttctgccagtataaccacgtgctaatcttaaagtatccaatgtagcttctgtaccagatgacaccatacgcactttttctattgaaggtactcggtcaataacgagctgcgccaatttattttcaagtaatgttgatgcaccaaaacttgtacctttatcaattgcttcatgtaaatgactaataacttgagggtctctatgtcctaaaataagcggcccccaacttagtacatagtcgatatactcgttaccatcgatatcataaatttttgagcctttaccgtgatccataaaaattgctggtgtatctactgatttaaatgcgcgtactggactatttacaccaccaggcattaaagtttcagcaaccttcattgcttcttctgatttcgtatatctcataaagtaaattcctcctatagtttatggaaaatcatacatataaaaccttatttatctaaatagcgacaaatgtcctttgcaaaatacgtaataatcatatcagcacctgcacgtttcattgaaaccatttgttccataacgacacgttcttcatctatccaaccattttgtgccgctgctttagtcatactatattctccactcacattatatgcaacaactggaacattcgtatgatttttaacatctcgaactatgtctaaataacttagagcaggtttaacaatcatcatgtcgcacccttctttaagatcactttctaattcacgaagtgcttccaaacggttagcagggtccatctgatacgtttttctatccccaaatgatggcgctgaatctgctgcatctctaaaaggtccaaagaaacttgatgcatacttgacaccataactcattataggaatattgtaatagccggcttcatctaatccacgacgaatttcagcaacaaaaccatccatcatattacttggcgcaataatatcagcaccagcttccacttgagaaattgctgttttaacaagtagtggcaatgatttatcattgtcaacgtcatgtgtatggtcatcaatcacgccacaatgaccatgatcagtatattcacataaacaagtgtctgcaacaattaataagtcatcatacatttttttagcaatacgtgttgcctgttgaataacaccatcgtgaatgtatgcaccagtacctatatcatcttttgagtttggaacaccgaaaaacataatggcacgtatgcctaagtcataagcttcttttaattcactttcaagtaaattcaaactgatttggtatacacctggcaatgacttaatttcttttttcacatcgtctttttcaactacaaaaattggatatattaaatcttcttttcttacatgattctctctaaccatatctctcattgtcgctgatgatctcaatcttctatgtctatcaaatttcatttttagcccctactttctaaaatcttttcaattagtgattcgagtgtttgaatttctgcaattgttactggttgttgatatgttttaatggtccgtgctgtttgttctccaatagcaaaatacgacttgaattttggtacaaatccttcattaaaataataacgtactgccgacgaacttgaaaatgttaatgcatcgatttgttgatgttctatcatttctttaacatcttgtatattttgtttgttaggcactgaagtatataaatctattttaacaacttcattatctttagataacgctgctaataacaatggtctcgccaattcactcgaaggcaaaagtattttttggttagtttgattaaatgattttaaaaatccttcttgagaaaagtcgtttggcataaaatcaactcgaatgccaagtgattcacaatattgcgctgtcttacttcctatcacagcaatgttatcaacattaattccttttagatatttataaaagaatttcacagcatttttagatgaaaaaataagccagtcatagcgttgatttaacaaatgaatatcaaaatttagtggctttatatcaataaagggtttgtgaataattgatactaaatcactttgcatgtcatttgtttgtgtcataactacaactggcttcatatttaaacgtcactccattatttaatgttgttcatttaagcgttttataatttcataagcaccttgctcttttaatttgttactcactgttttgcctaactcaaccggatctgttccgttcattgtatattcaaatcgttctttaccatctggggtcataattaaacctgtaaattcgatttctttttgatctgagattgtagcatatcctgcgattggcacctgacaactaccatccatttctgctaaaaacgttcgttcagcagtcacacattttgcaacctcatcattatgtactttgcttaataatgttaatagttcttcatcgtcactacgacattctatccctaaagcaccttgtccgattgcaggtaacaatgtatctctatcaagataagatgttacaatatcatctgaccagcccattcttcttaaaccagctgcagctaaaataatcgcatcataatcttcagtttgtaacttttctaatcgtgtatctatattacctctaatccatttaatctctaaattaggatacttagataatatttgtgcaccacgacgtaatgaactagtaccaataatactgccttctggcaattgggatagtggtgtatgtgttttagaaatatacgcatcaaaaggtaattctctatcagggatacaacctaatgttaaaccttccggaattacacttggtacgtctttaagcgagtgtattgccatatcgatatttttttcaaaaagttcatgttgtatttctttaacaaataagcctttgcctccgactttagacaattgtttatctactatacgatcgcctttcgtgacaatttctttaatttcaatttctagatttggctcgacagcttttaatttattaataaattgctggctttgtgttaaagctaatttacttcttctggagccaacgactaatttacgcatgttcaattcctcctaggaacggattgctctagattattttctcaattcacaaaatgtgttgcaaaaaataaattaatcatatttaagcaaaataaaataatgttatagtatattaaataccttgaattcaaccatttgttgattctaagcaatatataacttccatataatactgtaataattgaagagagtattaccttcgggtcaatgaatatacgttcaccaactgaaattacaccccactgtgtacctaaaataatactaaatatgagaattatccacccacttaacgttgagtaaaacacaattgattcaagtgtagcaacgctacctattctaaagtatttttgatcaaaacgtttttccttcaaattacggtattgcatgatatacagtaatgcattgacaaaagctaaggcaaagaagacataacttaacacagctagaccgatatggactaacagtaactcgtctacaacagcaattttctgaaccttattagtataatgtgtcggttgaaatgtattcatccctaaaagtgttaaccctattaaattcaagaaaaacacagagaaattcaatactttgataaggttaagaattaaagagattgaaataatcagccaacttaaagtatagaatacatctgaaatagaccctaatggaatatgtctagtttgtataataaaaatagataaagagattgtttgtaaaacccaaacaatccccaataaatatatgcctaaacttctaatcttatgacttttttggacaaaatcataaaaatagcaaatgatactgattaagtatattaataatataatttcattgaatcgaataaacaggttttcttgcatattatcaccatattaatatgcttattcaaaactaaagatacgtcgcgctgaaatttccttgaccttgctttctttttgttgcttcgcttgctcatgaggacattcagcttcgatatcaaatatattttgaaatagctctaatttttcattacttttcttatcactacttaattctttggcctgtttaataggatctttcaacatttgattgatgatactttttgtatgtttagatataattttacgttctctttcgcttaaccctggcaatttacgatcaatactgtccatcgtttctgcttgaattgccatagctttttcacgtaaagctctaatcactggaacaacacccaacatactaatccactcattgtgtgcatgtatttctgcaggaatttgttccgaaattgttgcagccgctaattgtcgctcacgtaagtttgcatcaactaaaccttttaagtcatcaacatcataattaaagatgtttgtgatggcactaataccaggttcaatatctcgaggaactgcaatatcaatcaatactagtgaatcttgctttctattttctgcaattctttctatcatttcatttgtaatgatataagattgtgcactcgttgaactaatcacaatatctgcactttcaagtaaatttggtaatgatgatagttcatcatatttcacttgatgctttgctgctaatttcatagcattttcaattgttctatttactactgtaatatcagtaattccagaaccaagaagatttaatagtgataattcactcatttcccctgcaccaataatgatagcttgcttacttttcaatttgccaaatacttttttcgccaactcgaccgcagcataagacacacttacagcattatcagctatatctgtttcattatgtgctctttttgcaaaagtaattgcctgtttaaatagatgattaaaaattgttcctgtcgtacctgtgctttgcgctaagaaaaatgcatctcttatttgacctaaaatttgagtttctccaagtacgattgaatctaaaccagaagtgacacgcaataaatgttctactgcttcgtcccccacttttacttctgacattgctttaatatcatctacttcaaatccaaatgcacgagctagaaatcgttgaatatagtaacgacctgtgtgaatttgatcaacaacagcatatacttcagttcgattacatgttgataatatgacattttctaaaatagatttagtttcatataaatcttcatgggcaattcgtaaggcatcatctctaaaagcaacttgctctcttagtgcaacatcagctgtgcgatgatttatactaattgcaataaaatgcatttgaaacgcccccatatatactaacaatacaaatattataacataatttaaaatccaattaagtacgatgcttaaataaattataatctttctaatttacttttgagtttttgacaaaatgatgaacgttgaaaaatgttatcaattgtgtactaattaaaagtttcgtgcttacattatttttaaaatttttgtataagttttgtcgtacaaaaactatgaaatatacggttcaattaaattccatatttgttgttgtttattattttgaattgatgaataacttacaattgtatcgtctgggtccatatctaattgtgtcttaatatttttaatatgcttttgaactttaccttttggaattttgtcttctttagtgcatataactaaagtaggaatatcaaaatgtttcaaataattgtacattaagatatcatcttgtgttggatcatgtcttaaatcaactaattgaataactaattgcaaattctctctcttagttatatattcctcaatcattttcccaaatttttcacgttgtgttttacttactttagcatatccataccctggaacatccacaaaaataagttgttcatctatattataaaaatttaacgtttgcgttttgccgggttgctgtgatgtacgtgccatattttttctgccaatcatactattgataaatgtagacttacctacattagatcgaccgctcagtgcaacttcagacaattctgtttctggatattgttcttcttttactgcactaatgattaattcaatattattaggattaactttcattttatatcctcacttttttatattctctttcaactctaccattatataatatttgaacctttcggtatacattataaaaaagctccgatcaaagttaaactatttgagcgtcaactttgattggagcttttcacttttataacacatcaatgattaagctgatgttttactattattaattaaattgccttctgcgtcgtatagttctggttcagtttcttcattaattgtttgtgctgtaataactaccttcgttacattttcgttagaaggcacatcaaacataatatcgattaacgattcttctatgattgaacgtaaaccacgcgcacctgtttttctttcaattgctttttcactaattgctgataaagcttcttcagtgaactctaaatccacatcatctaattccagcattttagtatattgtttcacaagtgcatttttaggttgcgttaagatgtttttcaacgcagttacatctaatgtttctaaattagctacaattggcacacgtccgataaattcaggaatcaaaccataggcttgcaaatcttctgggcgaatttgtgctaataatgcttgttcgtcatatttatcagcttcattgcttgagaaaccaataactttttcaccaagacggcgcttaatcacttcttcaataccatcaaaggcaccaccaagaataaataagatatttgttgtatcaatttgaatcatttcttggtttggatgtttgcgtccaccttgtggcggaacacttgcagtcgtaccttctaagattttaagcaatgcttgttgaacaccttcacctgaaacgtcacgtgttatagatgtgttttcagatttacgtgcaattttatcaatttcatctacataaataatacctttttcggctttatcaatgtcaaagtcagctgcttgaattaatctcaacaagatattttcaacatcatcgcctacataaccagcttcagttaaacttgtcgcatctgcaattgcaaatggtacattcaacgtcttggctaatgtttgagctaataatgttttaccactacctgttggcccaattaatgcaatgttacttttttgtaattcaacatcatcttcttttggtcctaattgttgaatacgcttatagtggttataaacagctacagctaaagattttttagctttttcttgaccaataacatattcgtttaaatgatccataatttctttaggagtaggtaattctgtcatcgcttcagaagtgttttgagctaattcttcttcgacgatttctgagcataattcaatacactcattacaaatatatacaccacttcctgctacaagtttttttacttgatcttggtcttttccgcagaaagagcatttcaaattttcttcatcttcattgaatttaaacattctttttacacccctattcgttaaagactatactagattggatattacaatgcaacatattaacatacaaactttttgcttaaagaatagtagcagatacataagctatgcatctgctactcatttttgtaatttaatatttaatgaagattaatcttctttagttccttcaacgaactttgcgttatctcttaataaatcgataactttttggatacgaacatcatttttaatgatatcagtattacctaaagtatttttgatatcttcaactgagatattaaattgtttactcattttttctaattctttatcgatatcttcatcagtagcttcgattttttcagcttcagcgatcgcagttaaagttaagttagttttaacacgttgttctgcatcgtctttcatttgctctcttaattgagtttcatcttgacctgagatttggaagtacgtttgtaaatctaaaccttgttgttgaattctttgtgcaaattcagacaccatacgatctaattcagtattaaccattgcttcaggaatatcgattgttgtattatcagtagcttttgtaatcgcttcttctttttcaacattttcagcatctgtagctttttgttcagctaaacgtttacgtaagttttctttgtactcgtctactgtatttgcttctgcatctaattcattagcaatttcatctgttaattctggaacttctttaaatttaatttcgttaacttttgttttgaaagttgcttctttaccagctaattcttcagcatggtattcttctgggaatgttacgacaacatctttttcttcgtcaactttcataccttctaattgctcttcgaaaccaggtatgaatgaacctgaaccgatttctaaatcgtaaccttcagcttgtccaccttcgaattcttctccgtcaactgaaccactaaagtcaatgttaactgtgtcgccattttcaacaacaccatcttctttaactaccatttcagctaaatgtcctaagctgtggtcaatcgcttcttgtaactcatcatcagataattcagtttcttgtttttcaatttcaagacctttatagtctcctaatttaacttctggctcaactgtaactgttgcttcaaaaatgaaatctttacctttttcaatttgagtaacacttacttctggttgtgcaactggtttaatatcagtttcgtcaattgcttcaccataagcatctggtaataaaatgtcgatagcatcttgatataatgcttctacaccaaagcgttgttcaaaaattggacgtggcactttacctttacggaatccaggtacgttaatttgtttaaccacttttttgaatgcttgatctaacgctttgtttactttttctgcaggaacagtaacagttaataaaccttcgttaccttcctttttttcccaagttgctgtcatgtatatatacctccatgattaactaatttattttttcaacttccctattatatcataggtctattccctatacaaacattgaaatcacaacgtttatatatttgtaaatcaacttttttcgtcaaaactatattaaaatgctgagtattattttgcaacaatttaactattattattcaaatctaattgctgaataaaattaaatgcatcgatactttgtaattcacatttaagtcctaacatatttttgaaataacattcgtatgcattaatccatttattcgtttcaaacaaagtttcaatatcaattggataaatcatgatagagtgattattcataatatggtgtgcttcttcagcgatatgtaatgcaccatcatttaatgtttccataacgttaggtataactttttctttcagtgttgtatgttctagcccatttaaattagctggtacaaaagttacatccataccatacttttcaattgtcagttcttgtgtacaatttgcaaaccttaaatactcaatcattaaactaatgaggttataactgtacgtattagattttaatatatataataccgtttcttgaaattgaaaatgaccattgtctattaacttcaaaatcaagtgcgtctgttccctcattgataacgtatcaaaatcagttaatgactgagtcaatcgtttttcatcttcaattaattttgacttagcaaattctttaagaggatgtaatgccattcttgttttgtgatctttgacttcatcaataatttgatgaattacttctaccgcttcaaaatattgtcccaaaccaatcaaacttttcacgtaataaatcatcaatgcatcatattgttgtatgccagttttcaataagacaattgtttcttctcttaattcaagaaatgaccccgtctcatataacatacggcatttcatcattgctatttcttcagtgagttcaaattgacgttcatattgcacaatatattcatacatcaggtcatagttttggtcttgttcagcacgttttatatctttatataactttttcgaagagttaggaaactgaataatatctgacatatatgtcacctcgtttgattataaatcttgaaggattaatgcgctccacgtttcgaaatcatcatatgactctatgttgcctttttcaacccattttattcgtaaagtatctgtttctttagcttctacatcattcgtacttacagtgattttaaatacaacaccaatatgtaccttgcccacttcattattatcgtcattaataaaaccgatatattccatattttgtgaatcttgctcacttaaacctacttcttcttctaattctctctgtgcattaactctcaatacttcgttaatagattctgctcctggaacatcattcatatgaccgcctacacctattgaagattgtccatgcaatcgagcttctccaccgccagataatcgttcatacactaatatctcgccatgctcattttcaagtaaacaataagaaatgagttgtttatatgatggatcctcttccatatcgccgcgtcgcttaacttcatattgacttagcgcatcaaaaatattttgaccttctggtttattcttatttaaaaacccattgaaagtattcttttcattattaaaaataatttctctaggtactacaatgatttgttcatcaaatttagacatcgtataaaactcctcactttaatgtttgttctcttaaatgcattttagcaaatatgtcatattttagcgattaaatgtggcattttgctttttaaaaaataaaaaagagatgacaatgccatctcttttttataagtgttattattttaaagcatctttagctttagttactaattgagcaaatgctttttcgtcagaaattgcgatttctgataacattttacggttaatgtcgataccagcttttttcaaaccgttcattaaacgtgagtagctcatttcatgttgacgagctgctgcgttgatacgtgtaatccataatttacggaagtcacgtttacgttgacgacggtcacggaaagcatattgacctgatttcattacttgttgcttagctactttgtataatgtatgttttgaaccgaagtaacctttagctaatttaatcgtttttttacgacgcgctcttgttactgttccacctttaactcgtggcataaaaaattcctccttaggtaattcctaccgatttctgtatttgttcttattttttgtatgctaataattgttttacacgtttcatatcgctcttagacactaatctagctttacgtaattgacgtttttgtttagtgctcttgtttgcgaataagtgagatgtgaaagctcttgaacgttttaattgacctgaagcagttcttttaacacgtttagctgctccgcggtgagttttcatttttggcataatataagtcctcctgtaatagctttaattatttttcagctgttggcgctaacatgataaacatttgacgcccgtccattttaggtttttgttcaactgttgctatatctttgcattcatctgcatatttttctagcacacgttgaccaatttccttatgcgtaatggcacgccctctgaaacgaatagatactttacatttatcgcctttagttaagaatttacgtccgtttttcaacttagtttggaaatcatgttcctcaattgttggacttaaacgaatttctttaacattgataattttttgtttctttttcatttctttttcttttttctgttgttcgaatttgaatttaccgtaatccataattcttgcaactggtggtttcgcattcggtgcaacgaccactaagtctaaatctacacgttcagccatttctaaagcttcacgctttgatttaacaccaatttgttcaccatcttgaccgattaaacgtaattcttttgcacgaattttgtcattgatttgagtttgatcttttgctatggttgacacctccaaaatttttacgaaatttgcaccaagcaaaaaggaagagcaggtataaaatacccgctcttccttatacacaattatgtgtaatgtgattaacctgccaactgctttatgcgtcgctacaggtgagaagcgggtgcttctacttggttcgtttcgtattcaacgttgttaatcatatcaacaattcacatttaagtcaacaccataactgtaattatttttattttaaccttttatttcatccattgacacgtcttgacgtaaatctacttgttctaatggaatttttttcgttttatatcgaagcttatgataaataaagaatgctaaaaataccggaatacccatataggtaattaagaagcgactaaaattaaaatctcctgttttaataaagtcaacatcttgaccaataattactacaatacataaaaagccagcaaataatggtccgaatgggaataatttagcagtatattttaatttagatttgtcataattttgtttatcaaatgctcttctaaatcgataatgactcactgcgatacctacccaagcaataaaaccagttaaaccacttgctgcaacaatatattcgtatgcaccttttgtaaggctttgtaatacgaaaataatcactacaatgattgctgtaacaagtaacgacatatatggcacaccgtttttattcgttttaccaaatgcttcaaacgctaatttatctttactcattgaatatagcattcgagttgaagcatacataccagagttacctgctgataacacagacgttaaaatgactgcattcataaatgatgctgcaaacgcaaatccagcatttttaaacactaatgtgaatggagacgttgctacattatcactaccacccattaatgcactactatcataaggaattaacataccgataacaaaaatggctaaaatgtaaaataataaaattctccagaaaacttgtttaatcgcttttggcacagcacgttcaggattttctgattcaccagccgtaataccaattaactcagtaccttggaatgagaaaccagcgattaagaatacacctagaatagataacaaacttcctcctaggttgccacctaaaataggtccttcacctttattaaatatttcgaatcctacaacatgaccacccatgattccgacaatcgttaataaaccaattgcaatgaaaacaataactgtaaccacttttatcaatgccagccaatattcactttcaccatagacacgaaccgataacgaattcagactaaaaatgataactaagaacaacgcactccatgcccaagcgggtatgccttgcaatggtgtccaatattgaatgacttgtgctgcaatcgtaatatctgctgctacagttactacccagttaaaccaatagttccaaccaagcgcaaaccctaaagatggatcaacaaatcttgtagcatatgtactaaatgaacctgatactggcaaataagttgccatttcgccaagtgacgtcattaagaaaaataccattattccgataattgcgtatcctattaatgcacccaaagcacctgcatcatgaattgctccaccagaagttacaaataaacctgtaccaatacaaccaccaatcgcaatcatagaaatatgacgatctttaagtccccttttgacaacattgttactttcattttgaacttttgacatataagctccctttccatgttttagaggccaagaaataaataacctttatttactttcatacccactttaattttctttcaaagatattaaaagtaaaaaagtggctacatacctttaagatatgcaaccactttggcaattatctatataaggtagcacatcacattctgtgacagtacagttcctattcgaaaactgtcccaatagatataatttatggtttatatctatttcggcatctttacctttcacttgttcaacttatgtaccataaatacttctgacaagttactaattaaacatgcaacctctaactcaatttaatattttaactaacttgtaatatacaggattcatcacgcataatcaaccctgtaaaacttgatacgcaataaaagtttcaaagcattttattgcgacaactgtctatctatgttttttcaaacgaatttcatcaactagattccagataaattcatctttttcaactgtttcttggtcttgcgatccatattgacgcacattcacttgattattttcaacttccttatccccaactacgatttgataaggtattttttgcatttgagcttctctaattttataacccattttttcattacggtcatcaatacttacacgaacgccttgagatttcaattcatcttgtaattgacgcgcataatcataatgtaaatcaacgttaactggaatgatttgaacttgttttggcgctaaccaagttgggaatgcacctttagtttcttcagttaaaaatgctacaaatcgttccattgttgatacaacaccacgatgaataacaactggacgatgatgttcaccatcttgaccaatataagttaaatcaaaacgttctggtaataagaaatcaagctgtgctgttgataatgtctcttctttacccatcgctgttttaacttgaacatctagtttcggaccatagaatgccgcttcaccaatcgcttcttcgtacgataagccaagctcatcagctgcctctttaagcatattttcagctttattccacatgtcatcatcatcaaagtacttttctttatcttcagggtctctataacttaatctaaagctataatcctcgaaaccaaagtctttatatacatcaataatcatgtttacaacacgtttgaattcttctttaatttgatcaggtcgaacaaagatatgtgaatcatttaaagtcataccacgaacacgttgtaatcctgatacagcaccacttgcttcatatctatgcatcgttcctagctcagcgatacggataggtaattcacgatatgagtgtggtttattcgcataaatcatcatatgatgtggacagttcattggacgtaagaccatagattcagtttcatctaactgcattggtgggaacatatcttcttgatagtgatcccagtgaccagatgttttgtataaatcaacattagcaagtactggtgtataaacgtggtcataccccatgctcacttctttatcaacaatgtaacgttcaatttcacgtctaattgttgcaccgttaggtaaccataatggcaaaccagcaccaactaattggctatttgtgaataattctaactctttaccaattttacgatgatcacgttctttacgctcttctaacatttgtaaatgtgcttttaattcttttttatcaaagaaagcagtaccgtatatacgttgtaacattttgttgttactatctccacgccagtatgcacctgctgtagataatagtttaaactctttaattttagctgttgatggaacgtgaacgccacgacataaatcagtaaaatcaccttgactatataatgttacattttcatcttcaggaatcgcgtcgattaattctaatttgtattcatcattgctgaataactctttcgcttcatctcgtgaaaccacttttcgttctattttcatattttcgttaacgatttgtttcattgttttttcaatttgttcaaagtcatcagatgagatgttttggtcaatgtcgaagtcatagtagaagccaccttctattacaggacctacaccaaatttaacattaccatataatcttttaatcgcatgtgccattaaatgtgcagtagaatgacgtagtacctctaacgcttcttcactacctggtgtcacaatttcaattgatccatcagtttcaagcggtttagttaaatctacaagttgcccgttaaatttgccggcaactgcttttttacgtaatccaggactaattgattgtgctatatcttcagtagtagtacctttatcaaacgcctttttattaccatctggaaattgaatattaatttgttccatgttaaaccctcctatttgctttataaatacttttatctgacctcgttaaaaaattgaacaacaatcatcgttttaacattaaacctattaacaataaacagggaatttatgacaccaacgaacatttttgtctaaaaaaaacaaaaaatcccgcccctatacaagggacgagatcgtcgtggtaccaccctagttatttaatacaagttatgtattaaatatctctgcttaagataacggtcttgagccgggtattcattacaaataccataaatgaagtagtaatcatctaatttattaaccatattctcatcaaacaatggctttctgtgtaatattgattagatcatcttgtcttcaatcatttaaacgatttagatttgtattcattatacaccaatcattttaaaattcaattgtttctgaaattttctcctgataaaaagtatggtgttgacaaagatttgacacgttcaataatacgtgctgctttagtcttctcttcaccatcacgagtcatcgccaaatgatgttccaattcactatagtcaaaattagaactaaagaatgttggtaattcatgaaccattcgataatgtagcaaaggtccaattacctcatctctcacccatggagtcacttcttcagccccaatatcatcaagcattaaaatgtttgcttctcttacgcgatgtaatttcttttcaaaagaaccatctttaaagccaccttttaatgttctaataaattccggtaaataaataattgtcgaacgtaccttcttagatttgagctgattcgcaattgcacctagaataaaagatttacctgtcccaaatggaccataaaggtaaaggcctttcacttgttccccattagttattgctgtacaaatatcatctgctgccatagctacatcaagacggtctcgatgattcatataaatatctttcaatttggcatttaaagtatctcgttgcatatgatgagatgtaattagctcagcttcaaagcgttcttcgtcgtacttgattttacatggacattgtaaatagcgtattttaattcggttattatcaacatataactcaggcacatgcccctttacgaaatttggacaatcagcaaatttatgaccgtcataatgtttttgttgatctttatactcttgtaacacatttaagtcttcatcaatcatagcattcgttaattcagctcgatgcgcttccaaaaattgcttaacatctgggtcgttgattacttctttttttatcttttctattcttttttcaaagtcctgcgacgtgttaattatacttttaaattgcttcattattgactgtcctcctcccattttttagataatttatctagaaatgcttgtcgatcttgctctaattgttgatcatctacgctattgtctttagccgaatcttgttcactaggtttatctctattttctaaccatttaggtgttttttcttttgaaatgcgattacgctgcccatagtatgaaccacgcttttggtaatttccgctagacccctcatttttaggttgattaacttttttagcgtaattatatgcttctttagctgtcttaataccttttttcttccaatttgatgctatttccaaaatatacgctttaggaagtttcatatcttcttttaacatgacaaattgcaacaaaatattaatgacgccaaaagacattttttcacgttcaattagttcttcaaccattgctttttgcgatatagttggttctgattcagaccaagaagctaacatatcaattggactcgtttgttcaagtaattcaaaccattcatcactttgtggctttggattcacttctgaagatttacccgtcgaagatgatgtagcaggagatttcacctgtaatttaggcatttgattttcgtgttccattaagtaatacgagcgtgcttgtttacgcatttcttcaaaggataactgttgtccacttgtaattgaatttaaaataacatgcttcatgccatctgctgttaaaccatataaagtcgcgagttgtgtaattaaacgctttgcatctttggtaacaatgtcttgactaataaaatgtttacctaacatttgtctcaacatttcaaagtcaaaagattcatttgataaatcgataccttggtacggttcattaatcggaatatcacttgtatcgatatctatttttgtagacggcactttaaaaacatcagtaaattgtctcgttacctgtttaaattcactcaaatcaatttgttgatactcaaagtatttcttcaactcatgaaatcgacgatgctcgacttcgctatataaaaagattgacaacattggatcattaaaaaataaatgcgctgaaggcggttgaattaattggtaaacaaattgtgtttcttgttcatcatgtttgacaaacgcctttaacaatccaatcgcttcaagtaagtccatttgttgtctaaactctagtaaattaattttaagttcattcataaaaatataatgagaaagaatcaatgtttcattatgactttctttaacgaattgagtcataaaatggtataaacccactgcttgtgttccaattagcggtgtatacagtcgattcaatacctctaaatgattcgtatttaaatcaaagtgttgcataactttgaattgatcctttggtcttaagccgaattcgaaggcttgtcgtcccatttaagcatcactccgtttgttttcgcttaaaatcccttgcatcgatgctaacaattgatcaacatctttaaattctttatagactgatgcaaatctaacatatgaaacttgatcaacatgcattaacaagttcataacgtgttcacctatatctcgtgaagacacttccgtatgaccttcatctcgtaattgccattcaaccttgtttgttatgtcttcaagttgttgatatctaactggtcgtttctcacaagaacgcacaagtccattaagtattttttctcttgaaaactgctctcttgtgccatcttttttcacaactataagctgactaacttcgatatgttcaaatgtagtgaaacgtgttccacaattttcacattctcttcgtcttcgaatggcatttaattcatcggcatgccttgaatctacaactttagattgtgtagaattacatttcgggcatttcattacatcaccctctttattttgattatgcctaattatactataaatctagagatgaaaaaagaatccctcaatttaattcatttaaccaaataatgaaacaataaaaaacattatatcgttacttaataagtaatatgcatgacaatattattgtattaaaaataaaaaacctaactccgaagtcagagttaggctattaaataattgtattaacttgcacttacagtttcttttgatgtcagaagtgctccaatttgctcagcaacatctacaactctatttgaataaccccattcattatcataccaagcaataacttttactttattccctgacataaccattgttgattttgcatcaataatagctgaatgtggattagtattaaaatcaacagacactagtggttgatgttcgacttcaatgataccttctaaacctgcattttcaaaagcttggtttacttcctctgcagttacttctttttctaaatcaacaactaaatcaacgagcgatacattctttgttggtacacgtaatgccatgccgtgtaatttaccttctaattctggtaatacttcttttaaagctttcgccgcaccagtagaagtaggaataatgctttcattacacgagcgtgcacgtcttaaatctttatgtggattatcaatatttttttggtcatttgtaatagcgtgaacagtagtcattaaaccattaactattccaaactgattatttaaaacttttgcaactggaccaatgcaattagtagtacatgaagcattactaaaaatgtcaaatgattctatatctaattggtcatcatttacgcctttaactaccatttgaacatgtccaccttttgaaggaccagttaacaatacttttttggcacctgctttaatatgtgcgatggctttatcaccatgattaaatttaccagttgcatctatagcaatatcgatatctaattctttccatggtaagttttcaggattgcgatcagcaaccaatttaattttatgatcaccaacttgcaatccattttcaatcggttcaacttttagattatattttccatgtgttgtatcgtaattgattaaatgtgcaattgtttcgggtggataactagcatttatcgctactacatttaaatttttattttgtaatgcaatacgtaataccattcttccaattctacccataccattaattgcaatattcgttgacattaaaagcaccccttgatttttatgtgttatactttatggaattagtatagcatattatatgaaatttgaaagcgttttcggttgatttatttatcttttttataaaaaaatagtcattacttacatacatcaacgtgtacgtaaagtaatgacttatttatagtgcaatattaatcttcttctccgtaattcggtttttcaatataaccttcttctactaacaatctctcaaggttttgttttaattcaagtttatcccctaaattatcgataacatgatcggccattcggctttttttatcaatagaaatttggctatagacacgtgctttcgcatcttctaatgacaaattattacgttgcattaaacgatccatttgtatactttcagatgtgtatacaacccacacttcgtctactgtattttccaattcattttcaaataataatggaatatccatgattacattatatccttgttttaaatattcttgcttttcttcttccataatatctcgcacgataggatgtatgatagcatttaattctaagcgtttttctggatgattaaacactaaatcacccatataacgacgattcatctcgccattttcatcaattgcttcatcaccaaagacttctcgtacttgagctaaacctttactcccctttttaacagcttccctggctgctttatcagcatctactactttaaaaccgaatacggataagagttctgatactgttgattttcctgaggcgattccacctgttagaccaataactttcggcataatttcactctttctttatttttgacatactggacaataatgactatttcttgtcgcgatgatttttgtttcaatttgacttccacacactttgcataccggctgcttatatacattaagatgcaattgcatctcaccagtttttccatcagcatgacgataatctgaaatacttgtaccgccatgcttaataccttcttctagtacttctctaacataataaaaaaccatttcttgttgttggtgtgttaagtcttttacttttttatctggtaaaacacctgcacgaaacaacgcttcacatgcgtaaatatttccgcaacctgcaattactttatgatccaaaatcacttgtttgattggtttattcttattagactgttgatgaattcgatttaaataatacgtcaatgcttcatttgtaaaaggttcaggcgctatttctaaaaatgaaggataagatgctacagacgcaacatttctcatttctccaaaacgacgtatatctgaataaattaactttttgtcatttgacagctcaaaaataacatgccaatgcttacgataattaggtatcataatatcttcaagttcgtctacaatgaaaaaaccacccgccatacctaaatggctaattaatgtacgttgttctcgtttattatctagctgaaaaacgatatatttacttcttcgttctacattagtaatggtatagccttccgataaagttttaaaagtatctagttcaattccttttataattgtttccttgccttgagttttaccttcgattactttatccgaaaatataacgtgttcaattttttgatttataacgtagggttctattcctctttttacatgttctacttctggtaattcaggcataccattaacctcactttattttgcatcataccaagttgcaccataacttgagtctacttttaatggaacatctaattgcaatgcattttccattatctcttctacaaattcactaaatgaatctacttctgacttaggtacttcaaaaattaattcatcgtgtacttgtaataatagtttagcttgatatgttgtctctttcattttttgcgcaaatttaaccattgccagtttaatgatatctgcagcactgccttgtattggcgtattcatagcagtacgttcagcaaagccgcgtaaattaaagttacgactcgtaatatcaggaatatagcgtcgacgatgtagcaatgtttccacgtaacctaaagctttggcatcttttacaatatcagacatatattgttttacacctgggaaactagctaaataatcatcaatgaatgcttttgcttttttacgggtaatacctaaactttgacttaagccataatcacttatcccataaacaattccaaagttaaccgcttttgcttgacgacgcattaaactatcgacttgatcagcttctacaccaaatactttcatagcagttgctgtatgaatatcatcgccgttgataaatgcttctttcatactctcatcttgtgtaatgtgtgctaatacacgcaattcaatttgagaataatctgctgataatataacgctatcttttgaagttggtttaaaggcttttcttattttacgcccttcttcaagtctaaccggaatattttgtaaattaggatctacacttgataaacgtccagtttgcgctaaagtttggttgaaacgtgtatggatacgttgatcatcactaattaccttttgcaatccttcaacataagtagactgtaacttagataattgacgatattctaaaatataatcaatgataggatgttcaccttgcaattgctctaagacatctacagcagtagaatatcctgttttcgtctttttaataacaggtaattgtaatgtctcaaacaatacaacacctaattgcttaggagaatttatattaaaatcttcaccagctgcatcatggatatttcgaatcaagacgtctaatttttcttgaatttctttttccatttcttctaaatcatgaacatctgtatatataccaatttcttccatttcacttaaaatcttagctagcggtagctctaaatcagctaagagttctacctgattgtattcttctaattgtttatccatatttggtttcgcaaagtaaattgcatcagtaatagaagcaacatatggatttaaaacatcatcttcaggtaccttaaatttcttaccttttccatatatactcacatcgtctttcacaaaactttgaccgtacaatgaaacaactgattgaacatcactaatcgtacgagatggatcaattatataactggccaacataatatcgaatgaaatattttgaatatcaattcccaatctatgtgatgctacatatgtttttttagcatcatatacgacttttttcgtattcggattttctaaccatgaaactagttcggcataattatttatgtcatccgcattaattacaatatgtttctcacctgtaaataaagagaattttaaaatattatttcgcaaatagttaccaccgtctaattcgaaatggatggccgcttctttcaatgaagtaaaatcaacattatcaaaagacgtttcaatttcaaatgtcttttctattgcatcttcaacgcttgctgattgatcaatgtcagccaacaattgtttgaattctaacttcttaaacaattcgattttttcttgttgttcatcttgatgagtcattaacgtatcttcaagttttacttcaatcggactatctacattaatcgttgctaattctttactcattaatgcatcttctttgctattttgaagtttttcttttaactttttacctgaaatttcatctaaatgttcatagacaccttctactgtgtcaaattggttcagcaattttattgctgttttctctccaacacctgcaacacctggtatattatcagaagtatctcccattaatcctttcatatcaataatttgattaggtgttaggccgttgtatttttccgcaataaagtcaggtgtataatgatctacatcagtaacaccttttttagtgtaataaatagttacattatccgtagcaagttgtgttaaatctcggtctcccgtaataataattgtctgaaagcccgctttatctgcttctttacttaaagttccgataatatcatctgcctcatagttatctaattcataacgtttaatatgataagcatctaataattggcgtatataaggaaattgctcacttagttcaggcggcgttttctggcgtccacctttatattcactatatttttcatgtctgaaagtcgttttacctgcatcaaacgctactaaaaaatgatttggcttttcttcttttaaaatcttctctagtaacattgcaaaaccatatactgcattggtatgaatgcctgctttgtttgataacaaaggtaatgcataaaaagctctaaaacttaagctattaccatcgattaatactaatttattcacaattttaacctccagaactaatttatatatattttagcatattcgactgtgatgtcgtaattaaagaaactatctcatagagtatttatacacgacctaatttcaaataaaacaagtgactatatagactaagctaaaaaataaaaagacataatcatgattgttcttgatgagcactccataaagtcaggttaaaagtccaacttttgagatgcacattatcatttcatgattatgtctactttttaatatttttatgctgctattataaatttttataggtaagaataagttatgaatcgtcagaaccaaatggaatatatttaactttggtcattttcggtaattcttcataattattaaaccactcttggtaatttttattgattggtgacggatgatgcatataatgttcaaacggcaatgattccactgtataaacctcttgtcgtggatgatctttaatttgttgttttaataactgaactcttttttcatgttcataatgaacataaataaatgcactaagatatatcatagctaaaactagtgatgcacctttaataaaattaacattgattgacttatatttccgaaattcttttaataaaataattaaaatgattacatgtatcgtataaacaatcaaaaaattacctggttcaattggagtaacaatgactagtgtcgacgcagaaacacatattgcaataagtaaggaatataaagtgatttgtgttttacgattattaatagacaaataaatacctacaaatatcgaaaacgcaaagtaaccacatacaattatgttcgcaaaaccaaccaatccaatatctgtatttttatttaataaaaactgattgtaaaatagtaaataataaagcggtaaagtgataaatcctatcataatgatacgacgctttaatattgttaaatgtacataccgatcacttctaagcagtagataaataataagcgctgcaatcatacttaatattataacctgactgaaaatgacaccatatggaagtgacgttgatatcatttctgcaaattttgaaaagataccttgattattagaaacttgttgatattctgatccttcaaataaaattttgcgataatttggattggaaaacataatgattgtacctatagttgcaatcataaatgaaaacaataatttataattaagtgttcgatttgcagtaaattcatacagaaaagctaaaattaaaatgatacagtggaataatgtcacattctccataaataattgaccgaagaagcttaaaacatagaatagtactgtaacacttaccggttgcttttctttatatataattgcattaatacaataataaatgataaagagtgaaattagtgttgatgtcgcataattataaaatcctgcaaaccagccatatgtatctgcataaatagcacttggtaaaattaacattaaagaaaatgctaacaaataatagcttgtccacgctttacaacgtgtaatgtgcataatcatccaaatgatacccatactaatgagaccatatgaaagccaacgtaaccagcttacatgtacagctataatttcaaaaatatttccgatatagcgaccattaagtgatgcaaatcctacttttaaaatatcagtattataattgctaaaccattgtaaatcatcgtgcatgagtggtagtaagatacccataaaagtataaaacaataatatcgcaattaatatcaaagttgtcttgtgtaattgaattgttttcactttgctaatcctcaaatctagttaaattttcctcaacttgtaggtcgaaaaattaattcaatatttttaatgtatttctaattttcacctatgcatgtctcctcaatcaaattagataaacaaggtatttaatattacttttcaacaatttatctaaatcgcctctcgcctttttctatgacgaatgattacacttgtgtattcaagtgtttaaattaagatttatttccgttcaaataaaacttattactttttaattaagtatctattttaagcgtgttactaaaatttctttattataataaatatattataaaattgcttgattcacaacaatctattacttataacttacaaaacgacatatgcaaatgacaaaattgacaaccgaatttattccacttcattaactctaatttaataccaatagagatttgaacgtaataaaaaagcagcaacaacttcgtgaaaaatatacgcgctgttaccactttaatttttattctttataatcttttagaataactttgaacgttgaccctttgccaacttgactattcacttcaatattgccttggtgggcctctactatatgctttgtaattgataatccaagacctgtcccaccagaatctctacttcgtgctttatctactctataaaatctttcaaaaatacgttgttggtcttctaatttaatacctataccaaaatcttgtacttcgaaaatgacacgaaagtcatctcgatacacacgaacgttaatatctccatcttcataagaatagttaattgcattcgttaacaaattcgtgattacttgagcaattttactttcttgtgctttaacaatgacatctttttcaatatcagtatgaatggaaatatttttttgattggcttgagtcatcatattatcaataatacgccgcgttaaatctgataaattcatatagtctgtatctaactcggtatgttgctcaatatgcgataaatctaacagatctgttactaaagattctattcgatttgattcttttaaaattatgttcaaaaacatgtctaatgattccgcatcattttttgcaccatcaataagtgtttcagcaaaccccttaattgaagtaataggggtttttaattcatgtgaaacatttgctacaaattcacgtcttaaattttcaagttgtttcagatttgtaatgtcatgcatcacaactaaaatcccttgcaaacttttttgagatctagttaaaatcggaacgcatgaaatatcaaagtacttggcatggacttgatttattgcaacttccaattgttcataaataggtttttcaactttaaaactttctaaaattaattgctcaatttcagtattaacatagccgtgatagcctatttgttctatattatgtgtgatgttgaactgttcataatacgctttatttgcaacaacaatttttccatttcgatctatcattaaaatagcacttggaatattttcaatcgttgtttttaaacgattggattgcattttttgctcattattaagcttttgaaggcgtcgtgctagatcattggtagacacaaaaagcgctttagtttctacaacattactttcaggtacacgtatgtgataataaccatttgccaacaattgtgttgcataagtaacttcttgaatgggacggattaatgtacgcttaaaactacggcttgcaaaatacaaacaaatgagtacaactaaacatgtcaaaataagatatttccacaacgtccaatgcatttctgtaatatcgttattgtaacctttaatccatacatgataaccgttaaccttcttattaaaaataaaaacgtcctttttttgaatatagctatcactatttgagacagctttcagtttgccactactaaacacctttttatcatttttagttatcaataaatctatattttgctgttttacaatttctttaactttatcaatctcattatcttggactaaataaatatatgatcttgcatctgttgctagagcttgttcgtgtttttctgataaaacatatgtgatggaagcgtgaataataatgcctaatgtaacaaaactgataattaatatactgcttatcaataacattaagcggtggtgaaacttcatcattgttctttaggtctttccaatttatagcctaagccacgcacagttttaataagttgtggcttcttaggattatcttctaatttatctcttaaatgactgatatgtacatcaacaattcttgagtctcctgcaaattcataattccataccgtatttaacatatgctctctcgtaatgactctgccttgtctttctatcaaataaagcaacagttcaaattctttcggtgttagctccaataactcattatgcttatatacttcaaaataatcgggtctaatacgtatcgatccgatggtaatatcatcgtcaatctcttctacttcttttacaaattgcgaacgtcttaaaatggcttttacacgggcaacaacttctctaggtgaaaaaggcttagtcatatagtcatcggcacctaattctaaacctaatacccgatcaaattcatcatttttcgccgttaacattaatatagggactaaatttttatttgttcttacagtcttacatacgtcaatgccatcttttttaggtagcataacatctaaaataattaaatctggctgttcattttctaccttctctaaagcctcatcaccatcaaatgcgacaacaacttcataaccagctgtttctaagttatatttaagtaatgttacgattgaatgttcgtcatctactaccaacactttttgcgacatggtatgcctccctaacttataattatatttacattataaccgaactatttataaaaataacatcctacacattatctttacacattttttacattactttacacataaataaaatacttcttatatttccttctataatttacatgacttactctcggacaacgaaataaattttgtgaaaatatcatttctatcccactacctatgcatgagttttactcatttattcctaagcttatgtacacattcgctttagttaatgtgtaagaaacactacataatcaatcattagtgactctttatcatttctatcctgctgccaacttcaattcatttaaaaaggtgaacctagcaattaaagttgctagactcacctaagtttattttgcttattttaaatttttaatcaattcatctgcaaatgctgatgtagaaacttcttcagcaccatccattaaacgggcaaagtcataagtaacaacttttgaagcaattgtatcttcaattgaatctgtaatcttatctgccgcttcttgccatcctaaatgttctaacattaatacagaacttaaaattactgaagatggattcactttatttaaacctgcatattttggagctgtaccatgtgttgcttcaaaaatagcatgacctgtttcataattaatgtttgcacctggcgcaataccaataccaccaacttgtgcagctaatgcatctgaaatatagtcaccattcaagttcattgttgctacaacatcatgctcagctggacgagttaaaatttgttgtaagaaaatgtcagcaatagaatctttaatgataatcttgccttctttttcagctttttcttgtgcagcattagcagcatctctgccttctttttcaacaatttcgtcatattgttgccaagtaaatacttgatcaccaaattcagttaatgctaaatcgtaaccccactgcttaaatgagccttctgtaaatttcataatattacctttatgaactaaagtaactgatttacggttattatcgatagcatattgaattgctgctctaactaatcgctcagtaccttctttagaaactggcttaataccaatacctgaagtttctgggaatcgaatatttgtcgcacccatttcgttttgtaagaaatcaattacctttttaacttctgttgtaccttctttaaattcaataccagcataaatgtcttcagtattttcacggaaaataaccatatcaacatcttgtggacgtttaacaggtgatggtactcctttaaaccaacgtaccggtcttaaacaagtaaataaatctaattcttggcgtaaagctacatttaatgatctaataccaccaccaattggtgttgttaaaggtcctttaacagcaattaaatattctttaattgtatcaagtgtttcttgaggtaaccattcgccagttgtatcaaatgctttttggccagctagcacttctttccattcaatgcgtttttcgccattataagctttctcaacagcagcatctataactcggcttgctgccttccaaatatccggtccaattccatcaccgataataaatggtataattggttcattaggtacgtttaatccttcagttccttgagtaattttttctgcagtcatagttattttacctccaaattttacatcttcatttttaatttgtattgattattttctttcttcaagcggaatatacttacgattcgtttcgccaatatatttcgctctaggacgcataattctattatctttatattgttctaaaatatgagcaatccatcctgcagaacgacttacagcaaagattggcgtgaataaatcatgaggtatttccatacagtgataaacactcgcactataaaaatcaacatttggaattaatcctttttcttctgccatgcgtttttccattttcactgacatttcaaataattcttctcgaccagcgtctttcgtaatttgacggctcatttctcttaaatatttcgctctaggatcaccatctttatatacacgatgaccgaagcccattactttatctttatttgcaaatttttcatctaagtaagcatcaacattttcaattgacccaatctcagataacatcgtcataacttgttcgtttgcaccaccatgtaatggccctttcagagaacctacagctgctacaatacctgagtacatatctgacaatgatgataccgcacaacgtgctgtaaatgcagatgcgttcaactcatgatcagcgtgtaaaataagtgctttattgaaagcttctacttctatatctgttggtaattccccacgtaacatatataggaagtttgccgcataacttaagtcaggattaggcttaagtggttctttatcttgtcttactcgagcaaacgctgtaactaatgatgctactttagcttgtatacgcattgctctttcataacgattttcatctgattcattttcagcatcaggatcgaaatgtgcaatatatgataatgacgtacgtaatgctgtcattggatgcacgtgatctgtaacatactcctcaaaatgtgtatacacacgaggatttaatgtcatgtattgatttaatttcccctttaaatgagcaagctcttcttcatttggcaatctatagttccataataggaaaataacttcttcaaattgcgcattttcagctagatcatcaatatcatagccggcataagtcaattgactttcaataattgaacttattttagtctctgctgcgataaccccttctaaacctctttgtaattctgccatgataaatttcccctttactgtttctttatgaaatggctttcaactaatattatagctaaacgcatttcgtttgtgaaatataaaaactggcattatatgtgcaacaattattttgtaaatctatgtaaatgtcacagaatggccacaaatagcaccattaaagctttttcaagattatattcatcaccaacttttagcatagaataaaattttcaattggttattatatatgattataaaatccaaagtatattaacatggaattttacacatttttaccgaaaataattgtatatatcctaatataagtgcataataaacatatctatatttaagggagatgtattatggctgaaaaattacaaagggaactgagcaatcgccacattcaattaattgctattggtggcgcaattggtacagggctattcttaggcgctggtcaaacgattgcattaactggcccttctatattactaacatatatcattattggatttatgttatttatgtttatgcgaggtttaggtgaaatcatcattcaaaatactgaatttaaatctttcgcagatgtaaccaatacatacattgggccttttgcaggattcgtaaccggttggacatactggttctgttggattattacaggtatggctgaagtaacagctgtagcaaagtatgtaagcttctggttcccagaaattccaaactggattagtgcacttttttgcgtattgttattaatgtcttttaacttattgagtgcgagactatttggagagttagaattttggttctctatcattaaaatagcaacaatcattggtttaattgtcgtaggtttcgttatgattctatttgcatataaaactcaatttggacatgcgagtttcacgaatctatacgagcacggtgtattccctaaaggagcatctggattctttatgtcattccaaatggccttattctcattcgtgggaatcgaaatgattggtgttacggcaggtgaaacgaaagatcctgttaaaacaataccaaaagcgattaatagtgttcctattagaattttaatattttatgtcggtgctctagcggttatcatgtcgattattccttggcaacaagttgatcctgataacagtccattcgtaaaattattcgcattaattggaattccatttgctgcaggcttgattaattttgtagtactaactgctgctgcttcatcatgtaacagtggtattttctcgaatagtcgtatgctgttcggtttatcaagtcaacaacaagcaccaccgaatttctctaagacgaataagtatggcgttccacatgtagcgatctttgcttcatcagcattgttactcgtggcagcattattaaactatattttccctgatgctactaaagtatttacgtatgtgacaacaatctctacagtattattcttagttgtttggggactgattatcatcgcttatatcaattatagtcgtaaaaatccagaccttcataaaaaggctacgtataaattgtttggcggaaaatatatgggctatctcatttttgtattctttatatttgtgtttggcctattgtttatcaatgttgaaacaagacgtgcgatatactttattccgatttggtttatactattaggatttatgtacttaagatataaacgtatcgctgctaaatcaaataactaaaaacaagttttacccctgttgaatatattaaagttcaacaggggtttttatatgcaacttataatattaaattgcgtacttgcctcaatacttttactttctcatctatttaataatgtatcatttcagaaatacatccatacttctattttataataattttccaaagtaatatgagtgaaagtttaaagctgataatgtacatgtataaaagatataaacatttatatagattgctattcatacattatcattatcaaatatcctattaattacgtcataaaataccagatgaaccaaaaaacgcctttccattgttgataaatggaaagacgtttttttataaattatagtacgtttgcatatccttcaaagattttaccttgagcagcatcaatcgtaactaacacgttattgcttatgtttttaacagctttttctacacctacaactgttggaatgcctttttctaaaccaacaattgcacttggtgatgtaattccattttcttctgtaattaagcctaacgctttttctacataaggtacaaacgtttcatcgattgagtttgtaacgataactttgtcagataaatctttaccttctaaatctttaacagtttcagcaactaacgtagtaccaacaactgatccacgtccaataccttgaccattagcaatttcgtcaccaactaggtggattttcatcatattagtagttccagtttcaccagttggtacaccagcagtaataatgattaaatcaccattagttactctaccagtttcaacagctgttgcaactgcattgtttaacagtgcatctgtactcttacgtccttttttaactacaggttgaacaccccaaacaattgaacattgacgtgcagtttcttcacttggagtcactgcaataatgtctgaatgtggacgatatttagagatagtacgtgccgttgaaccactttcagtagcagctacaattgctttaacatttaagtttaaagctgtatgtgcaaccgaaataccgatagcattcactaatgaagtttcaactaatttagtacgatctgacaataactttttgtaatcttgggctgcttcagctgatacagcaatatttctcattgttttaacagcttcttcaggatataaaccagcagcagtttcaccagataacattactgcatctgtaccatcatagattgcgttggcaacgtcactagcttctgcacgtgtagcacgtgggttacgttgcatagaatctaacatttgtgtagctgtaataactggtttacctaatttgttacattgtctgattaaatctttttgaaccattggtactttttcaggtgggatttcaacacccatgtcaccacgtgcaaccattaaaccatcagacacttcaagaatttcctcaatattatcaataccttcttggttttcaattttagggaatactgaaatgttagctttttgttcttctaaaatttcacgaatttctaaaacatcactaggacgacgtacgaaacttgctgcaatgaagtcaacattttctttaataccgaaacggatatcttcagcatctttttctgtaataccaggtaaactaactcttacaccaggtaagttaacaccttttttgtttttaagctcaccagagtttaaaatatcacatttaacttcttttttagcatgatcaatatctttaacttgtaattcaattaaaccatcatcaagtaaaatgtatgaacctacttgaacatcgttaattaagttttcatatgttactgagaacttttcaggtgttccttcaacttcattcatgctaacaataacttcgttaccacgttcaagttcaatgataccgtctttcatattatgcgtacgaatttctggacctttcgtatctaataagattgctacaattttgtctaatcttttagctactttacgaattgtatcaattctacctttatgctcttcatgactaccatgtgaaaagtttaatcgtgcaacgttcataccagcattgattaatttctcaatcatttcttctgattctgaagctggtccaattgtacatacaattttagtttttctcattttataattcctcctgaaatcttatatagataacttgttagcaagttcatatagactataatcaaatttatgatctttaccatcaaaaatttcatcaaaagatgttgctacaattttattgttcttaattccaacacccttagctgtttcaccttgcattaataagtctaccgcatatccacctaaacgtgatgctaaaactctatccgcacctgttgggctaccaccacgttgaacgtgacctaacacagacactctattatcaacattgatgtattgtgataattctttttgacaatcttgcgcagtcatgcaaccttctgctacaagaacgattgagtgtttcttaccacgtttaataccttgttcaattttatcagctatttctttaatatctgttttcacttctggaactacaattgtctcagcaccaactgataatccagcccataatgctagatctccacaatcacggcccattgcttcaatgataaatgttcgtgcgtgacttgacgcagtatctctaattttgtcgactaagccaataatcgtatttaaagctgtgtcaaatccaattgtaaaatcagtaccattgatatcattgtcaatcgtaccaggaataccgatagtttgaatttctttgcattcctcactgatgcgttgtgcaccgcgataactaccgtcaccaccaataactacaaggccctcaatgcctcttttacgtaagttttcgattgcaactttacgtacttcttgctccttaaactctggacatcttgctgaatacaagaatgtacctccacgctgaatcgtatccccaactgatcctaattcaagtttatgaatatcatcatttaacaatccttggtaaccatgatacacaccataaacttcaatttcattgtaaattgctgtacgaacaactgctcttacggcagcattcattccaggtgaatctccaccactagttaaaactgcaattttcttcatgacgacatacctttctataactgatttatctttaactctaaattaccacaaattgatatgtcattccatcaaaactaatgtattgaattgatgtaaacgttttaaatattgaattttattttaacttaattaaaaaaagattagtagccaccattttgactactaatcttagttaaaattcagtatctaaatattaaattattgttctaatgtacttcaatttatggtaaaacccagtaacgatttaacataaaaatgctcaagttgattattctatataagaaccaatatttctgaatttttcaaaccgatcattagcaatttcatcgcgtgataatgactcaagtgaatctaattgttcaacaaacgctgatttaatagctaaagcttgctgttcaatatctttatgtgcaccgccaagtggttcagaaatgacatcatctataatacctaattgcttaatatcatgggcagtaattttcattgtttcagctgcaattttagccaaattactgtctttccataataatgccgctgcaccttcaggagatataacagagtaagtgctattctctaacatcaatactttattggcaataccaatacctagggcacctccactaccaccttcaccaatgacaatcgcaataactggtacttttagtgaagccatctcaatcaaatttgttgcgatagattcactttgtccacgttcttcagcagctttaccaggatatgcaccttttgtatctataaatgtaaagataggacgattgaatttttcagcttgtttcattaaacgtaatgcttttcgataaccttctggatgcgccataccaaaatttcgataaatattatcttttgtatcttttccacgttgttgtccaataaccgtaacagcacgaccatttaaaaagccaataccgccaatcattgctggatcatctctaaagtttcgatcaccatgtagttccataaacgaatcaaagatatatggaatataatctaatgtcgtaggtctttcttgcaaacgcgcaatttgcacacgatcccatggttttaaatttgtatatatttttttagtttctcgttccaatgacgcttcaagcatgtcaatttcttcttgtaaatccacatcatttttatcttgagactcttttaaagattcaattttatttcgaatttcaaaaagtggtttttcaaaatctaacattatttagtcacctcttgatggatttttagaatttcagacaatgtttgacgcatatcattacgatgtacaactttgtccaattgtccatgctctaataaaaattctgcagtttggaaatcatctggtaatttttcgtttattgtctgttcaataactcgacgacctgcaaaacctatcaacgcttttggctcgcttaaatttatatcaccaactgatgcaaaacttgcagatacaccaccagtagttggatgtgttaaatatgatatatataatagtccagcgtcagaatgacgttttaaagatacactggttttacccatttgcatcaaggaaataataccttcttgcatacgtgcaccaccacttgcagagaaaagaataaatggtaaacgattctcagtgcagtaatcaatgatgcgacatatcttttcaccgataaccgatcccatacttcccattctaaaacgtgaatccatgacagcaacgccaaatttcataccatctagttgcgctgtaccagtcactactgcttctttaagacctgtcttttgttggtccttttcaattttttctaaataacttggaaaatctaatggattcgcagaggtcattcccttatcgaattctgtaaatgatccttcatcagaaattgcttctatacgtttatacgcagttaaagctatatgatgatcacaattaaagcacacatttaaattttcagctaattcttttgtgtacataattttcttacactttggacacttagtcataatacctgcaggcacatcattatttttagagtcttgtactgtaagatatttctttttctttgttcgattaaaaaaatctttaaacataggaaaacctccaaataacctctgttctaaccatttagagccataaactgaacttgaccagttaaaaacgggtttaaatttatttgatttatattcgtttgactgttgaatgtttatcataaactttcattttcatcattttaatgactctttattgctaacctttaagcaatttaattaaacgttaattatttttattgtaaatctgtaagtttcattgttttatcatacacatcttgcggatcaacttcaatcctagctactccagattccattgccgctttagcaacattacgagcaactgatggcgctacacgtttatcaaacggtcctgggatacagtagtcttcatttaattcagaactatcgattaaatcagcaatcgcttctacagctgcctttttcatttcttcatttatatgtgtagcttcaacctctaatgcacctctaaaaataccagggaaagctaatacattattaatttggttaggatagtctgaacgtcctgtaccaacaactcgtgcacctgccgctttggcatcatcaggtattatttcaggatttggattagccattgcaaatataattggattatctgccatactcttaaccatatcttgtgacagcgcattagctacagaaactccaataaatacatctgcgtcttttacgacttcttctagagacccttcaatcttatctttatttgtccatttagctacaacatctttggtaggattcataccatatgaacgtccttcaaaaattgcgcctcttgagtcacacataaccatatttcttacaccatacgcgtatagtaatttaacaatggctattcctgctgcaccagcaccatttagtacaacttttattttagcaatatctttgttaacaactcttaatgcatttaccaaacctgccattgttacaattgctgtaccatgttgatcgtcatggaataccggaatattagtttcttttttcaatcgttcttcaatttcaaaacaacgtggtgccgaaatatcctctaaattaataccaccataattaggttctaacaatttaactgttttaatgatttcttcggtatcagttgtatttaacgcaataggcaccccattgataccagcgaagcttttgaataatactgctttaccttccattacaggaatactagcttcaggtccaatgttacctaaacctaataccgctgttccatcagtaataaccgcaactgtatttccttttattgtgtaatcatacacttttcttttgtcttcatatatatctttacacggttcagcaacgccaggtgagtatgctaaacttaattcctctttattagtaacttttacatttggtttaacttctaatttaccttgattacgtttgtgcatttccaatgcttcatctcttaatgacatgaaatcagcccctaattcaatatttatttttaaaaaataacttggataaaacgcattacattataaaagtaaaaatattgggtaaatctgaatgagtaagaatttatggttttgtttatgtaacacaaatagcgataaatgataataaaataatatttataaagatacattaaaccatactatctaaagatatacctttaattattataatggatagcaaaaaccaatatatcaaaaagttattattttttcgcacgatatatcgacaaaattctttactcaatttatgtatactgctttttgtgctaattattcttatggattaatcaataatgtaaagtgaaactcataaaaataataagcataaaaaactaatataaacgcaaactgatggttaaaaaatatctaaccatcagcttactatatcataatttattagttgataaaagttatataagcctaatatcactagggttaaaggattgtataaaattattaaacatactatctttttgattaatatagcctaaagtagtcatttgtttaatcgtttcatcataaaaggataacacaacatcattagcattctctttcgtagctttaaccatctcttcaaacatatctatttgtgatttatttctaattataatttgtttggcaaatgctaatttttgttcttcaaaagtcgctaatgtctgaatctcatttataattaattgacgttgttgctttctaaagtcaaatttcccgctaactataaataagtcattatgtgataacaactcttcgtactttttaaactgattagggaaaatcacaccatctaaagtttcgatgccatcatttaatgtgacgaatgccatattttgaccatttttagttcggatttgtttaactttatcaaactgtactaatataggcttattattctgcgcgttactcaatttaaatatcgttaaatattgtttggcaacaaacattttatctactgggtgttgcgaaacataaaatcctaaatattctttttcatactgactaataagtgcatctggcaattcttctttatcttcatacatctgttttggcgttaaaatatcaaatagaaaaccatcttgttcaatgtttaaatcaccatccaacacttgatcaatagcttgtaacaacgttgaacgtgttttaccaaaagcatcaaacgctcccactaaaatcagtgcttcaagtaactttctcgttttgactcgcttcggtatacgtctagcaaaatcaaagaaatctttaaatttgccgttctgataacgttcatcaacaatcactttcacactttgataacctactcctttaattgtaccaattgataaataaatgccttcttgggaaggtttataaaaccaatgactttcgttaatgttcggtggcaatatagtgataccttgtttttttgcttcttctatcatttgagcagttttcttctcacttccaataacattacttaaaatatttgcgtaaaaataatttggataatggacttttaaaaagctcataatgtatgcaattttagaatagctgacagcatgtgccctaggaaaaccataatcagcaaatttcagaatcaaatcaaatatttgcttactaatgccttcgtgataaccattttgctttgcaccttctataaaatgttgacgctcactttcaagaacagctctattttttttactcattgctcttcttaaaatatccgcttcaccataactaaagtttgcaaatgtactcgctatttgcataatttgttcttgataaataataacaccgtaagtattttttaaaataggttctaaatgtggatgtaaatattgaactttgcttggatcatgtcttcttgtaatgtaagttggaatttcttccattggacctggtctatacaaagaagttacagcaacaatatcctcaaagtgttccggctttaatttttttaatacacttcttacaccgtcagactctaattggaatatgccagtcgtatctccctgcgacaacaattcaaacactttttgatcttcaaatggaattttttcaatatcaatattaatacctaaatcttttttgacttgagtcagaatttgatggataattgataaatttcgtaaccctagaaaatctatttttaataaaccaatacgttcggcttcagtcattgtccattgcgttaataatcctgtatcccctttcgttaaaggggcatattcatataatggatggtcattaataattattcctgccgcatgtgtagatgtatgtcttggtaaaccttctaactttttacaaatactgaaccagcgttcatgtcgatggtttcgatgtacaaactttttaaaatcgtcaatttgatatgcttcatcaagtgtaattcctaatttatgtgggattaaacttgaaatttcatttaatgtaacttcatcaaaccccataattcgtccaacatctctagcaaccgctcttgcaagcagatgaccgaaagtcacaattccagatacatgtagctcgccatatttttcttggacgtactgaatgaccttttctcggcgagtatcttcaaagtcaatatctatatcaggcattgttacacgttctgggtttaaaaaacgttcaaataatagattgaatttaatcggatcaatcgttgtaattcccaataaataacttaccagagagccagctgaagaaccacgacctggacctaccatcacatcattcgttttcgcataatggattaaatcacttactattaagaaataatcttcaaaacccatattagtaataactttatactcatatttcaatcgctctaaatagacgtcataattaagttctaatttttttaattgtgtaactaagacacgccacaaatattttttagctgattcatcattaggtgtctgatattgaggaagtagagattgatgataatttaattctgcattacacttttgagctataacatcaacctgcgttaaatattcttggttaatatctaattgtttaatttccttttcagttaaaaaatgcgcaccaaaatcttcttgatcatgaattaagtctaattttgtattgtctctaatagctgctaatgcagaaatcgtatcggcatcttgacgtgtttggtaacaaacattttgaatccatacgtgctttataccctgaactaaaacacttcgatgatctaaatacgtatcttcatgcgaatcaaaaacttgaacaatgtcacgatgttcgtctgcaacatttttaaaaatgataatcatattgttagaaaatcgctttaataattcaaacgacacatgttctaatgcattcatttttatttccgatgatagttgatataaatccttcagaccattattatcttttgctagaacaactgtttcgactgtatttaatccatttgtcacgtatattgtcataccaaaaatcggctttatattattggcaatacatgtatcataaaatttaggaaaaccatacaatacattggtgtcagttatggcaagtgcatcaacattttcagacacagcaagtcttacggcatcttctatttttaagcttgaatttaacaaatcataagccgtatgaatatttaaatatgccaccatgattgaatggctcctttctattagttaagttttgtgcgtaaagctgtagcaagttgctcaaattcatcccagctgtttactgaaactcctgacgcattcggatgaccaccgccaccaaaatcttgcgcaatatcattaataatcaattgccctttagagcgtaagcgacatcttatttcactaccctcatctactgcaaacacccatattttcaaacctttgatgtcagcaattgtattaacaaactgagatgcttcatttggctgaataccgaattgctccaatacatcatcagttattttaacttggcagaatccatcatccataagttcgaaatgttgtaaaacatacccttgaaacggcaacatttttggatccttttccatcattttatttaaaagcgcattatgatcaatatcatgaccaattaactttccagcaatttccatagtatgttctgaggtattgttaaaaaggaatcgcccagtatcaccgacgataccaaggtataaaacactcgcgatatctttattaacaattgcttcatcattaaaatgtgaaattatatcataaatgatttcacttgtagatgacgcgttcgtattaactagattaatatcaccatactgatcaactgcaggatgatgatctattttaataagtttactacctgtactataacgttcatcgtcaattcgtggagcattggcagtatcacaaacaattacaagcgcatcttgatatgttttatcatcaatgttatctaactctccaataaaacttaatgatgattccgcttcacccactgcaaatacttgcttttgcggaaatttctgttgaatatagtattttaaaccaagttgtgaaccatatgcatcaggatctggtctaacgtgtctgtgtataataattgtatcgttgtcttcaatacatttcataatttcattcaaagtactaatcattttcatactcccttttttagaaaaattgcttaatttaagcattagtctatatcaaaatatctaaattataaaaattgttctaccatattaaaatatttgcccgttttaattatttagatatatattttcatactatttagttcaggggccccaacatagagaatttcgaaaagaaattctacaaacaatgcaagttggggcggggccccaacatagagaatttcgaaaagaaattctacagacaatgcaagttggggtggggccccaacatagagaaattggacccccaatttctacaaacaatgtaagttgggctccaacatttgtgtgaaatctatcttatgcctattttctctgctaagttcctatacttcgtcaaacatttggcatatcacgagagcactcgctactttgtcgttttgactatgcatgttcacttctattttggcgaagtttcttccgacgtctagtatgccaaagcgcactgttatatgtgattcaataggtactgttttaatatacacgatatttaagttctctatcatgacattaccttttttaaatttacgcatttcatattgtattgtttcttctataatacttacaaatgccgctttacttactgttccgtagtgattgattaacagtggtgaaacttctactgtaattccatcttgattcattgttatatatttggcgatttgatcgttaattgtttcacccatttgaggctgtcttcctaaaagttgcatggactttaaaacatcttgtctattaatcacacccactgtctttttattactcgaaacgacaggaatcaattcaataccttcccaaatcatcatatgcgcacaacttgctactgtactcatagcatttacataaataggatttcgcgtcatcactttatctatttcgtcgtcgtcctttgtattaatcatctctcgacttgttacaatacctactaatttataagactcattgactaccggaaatcttgtatggccagttcgattcgccatacgcttataatctgctattttcatcgtatcaaacagcacagataaatcatctaatggcgtcattatatcttgaactattaagatatcttttcgtattttctgattaaaaagtgctttgttgataatatttgcaactaggaatgtatcataacttgatgatagaacaggtaaatcatgttcattcgcaaaattaataactttattagatggcttaaatccaccagtaattaatatagccgtgcctctttttaaagcttcaatctgcacatcttcgcgatttccgacgatcaataatgtctttggaccaatatactttaaaatatctttgagttccattgctccaattgcaaatttagataccatcttagtgatacctttgttgccacctaacacttggccatcaataatattgacaatttcattaaaagttaaatgttcaatttcattacgattacgtttttcgattcgaaccgtaccaacacgatctatcgttgcgaccatgcccattttatcagcatctttaattgcacgatatgctgtcccttcagatacgtttaaaaatttagcgattttacgcaccgaaattttagagcctatagataacgattcaatataatctaaaatttgttcatgttttgtcattctttacctcttcttttcgaacagtattaactacattataactttattttggataaaaagcattgaagtgaaacgaaataatgatcgtttcacctattttattttttgaaaatatacaacaaacacaaagatcacaaaatctttaattttaaatggaaaaatccattattatttattagaatgtaagtgaggagggatgtactaatgtataaaaatatattacttggtgtagacactcagttgaaaaatgaaaaagcactaaaagaagtgtctaaattagctggcgaaggtacagtcgtaacagttttaaacgcaatcagcgaacaagatgctcaagcatcaattaaagcaggtgttcatttaaacaaacttactgaagaacgaagcaagcgattggaaaaaacacgcaaagctttagaagattatggtattgattatgaccaaataattgttcgtggtaatgcaaaagaagaactattaaaacatgctaatagcggtaaatacgaaattgttgttttaagtaaccgtaaagcagaagacaaaaagaaatttgtacttggaagtgtcagccacaaagtagcaaaacgtgcgactatccctgtattaatcgttaaataaaatttttatccagaatcacaaataatctttcaatcatgatgcagtctcaatcgactgagtaacacaagaaatgattatgactgtggttctggattttttatattattcactatctaaccaacaacttgcatcaaacaaaaccattacgaaccaaaaacataatcaatatcataacccaccaagagttgactatggggccccaacatggaagctgacgaaaaagtcagcttactataatgtgcaagttggggtgggccccaacatggagaatttcgaaaagaaattctacagactatgcaagttgggctggggtcccaacatggaagctgacgaaaaagtcaacttccaatatcagtagaatataaaaaacactcactaaaaatatgcagacgataacttccacatagattagcgaggtgttttttagtgtaaaatctatattctatttaaaactgaacagattcacctggttttaaaatttgcacgtcccctacattaacagcatctttaaattgttgtggatcttgttcgattaatgggaatgtatcataatgaatcggtacagaaatttttggtttaataaattcattaatagcataacttgcatcatcaatacccatcgtaaaattatctccaattggtacaaaacatacatcaactggatgacgtttcgcaataagtgacatgtcactaaacagacctgtatcaccagtatgataaattgtttttccttcaacttcaaacacgatacccattggcatacctaaataaactggaataccattttcatgagtaaaacttgaactatgaaatgcttgaacaaatttaacgcttccgaaatcaaagtttgctttaccaccaatattcataccatgaacattttcaacaccgtgatatgaagaaagatagtcagccatttctgcacttcctattactgttgcacctgttttctttgctagttccacaacatcaccaaagtgatcaaaatgaccgtgcgttaaaacgatatagtctacctgcactgtttcaatattcaaatcacacttagggttatttgaaataaatggatctacgataacttttttgttgttcccttctaaataaatcgttgattgaccatgaaatgataacttcatttgagcatcctcctatcaattactatataaatttagtacccttttgcctcttaattataacaaattctcaaattttaaaaattgaaaatctagttaatgtattagcttgattttgaaatataataataattagcataaaatgtaagtaatattatgttgaggagtgtttataaaatgacaaaaatatcaaaaataatagacgaactaaacaatcaacaagctgatgcagcatggattacaacaccgttgaatgtatattattttactggataccgtagcgaaccccatgaaagattatttgcattattgattaagaaagatggtaaacaagtactattttgtccaaaaatggaagtcgaagaagtcaaagcatcacctttcacaggtgaaatcgttggatatttagacactgaaaatcctttttcactttatcctcaaacaatcaataaattactaattgaaagcgagcacttaacagtagcacgccaaaaacaattaatctctggtttcaatgtcaattcattcggagatgttgatttaacaatcaaacaattgagaaatattaaatctgaagatgaaattaacaaaatacgtaaagctgctgagctagcagataagtgtatcgaaataggtgtttcttatttaaaagaaggtgtgactgaacgtgaagtagtcaaccatattgagcaaacaatcaaacaatatggcgtcaatgaaatgagttttgatacgatggttttatttggagatcatgccgcatcacctcatggcacaccaggagatcgcagattaaaaagcaatgagtatgtactatttgatttaggtgtaatttatgagcattattgtagcgatatgacacgtaccattaaatttggtgaacctagccaagaagcacaagaaatttataatattgtattagaagcagaaacatctgcaatccaagcaattaaacctggaatacctttaaaagatatcgatcatatcgctagaaatattatttcagaaaaaggttatggtgaatatttccctcatcgcttaggtcatggtctaggattacaggaacatgaatatcaagatgtttcaagtactaattctaatttgttagaagctggcatggtcattacaatcgaaccaggtatttatgtaccaggtgttgcaggtgtaagaattgaagatgacatacttgtcactaatgaaggatacgaagtattaacacattacgaaaaataagagtgggacaaaaatgaaaagcttgttacaagcgcatactcattcagtcaaacactgccaatataacattgtagcgcctaggacataaatttttgtccaagtctaaatgcaatatgtaacaaacaagctagaaacacatatgcaggtatgttcatcagtaacatgtaatgaatcaatatcattcatgttcgatgatttcttcgcattgtttctagctttaatttatcattatttaattttaataaccaaggagatgataacgtcattctttaatacgctgtaatccattcccttttcatcaaatttaaattataagtgtaatgcttcttctacagatttatattccatttcaaatgcctctgcaacgcctttattggttacgtgacctttgtaagtatttaaacctaatgataatggttgatttgatttaaatgcttctctataccctttattagctagcatgagcgcataaggtagcgtagcattatttaatgctaacgtcgaagtacgcggtactgcaccaggcatatttgcaactgcataatgaaccacaccatgcttaatatatgtaggatcatcatgtgtcgtaattttatcagttgtttcaaaaataccaccttgatcaatagcaatgtcaataataactgacccatttttcatttgtttaatcatgtcttctgttacaagtcttggcgctttagcacctggaattaaaactgcacctattactaaatcactttgtttaacatacaactcaatattcaacggatttgacataattgtatgtacacgtccaccgaataaatcatctaattgttgtaaacgctttggattaacatctaaaatcgtaacatctgcacctagtcctagtgcaattttagctgcatttgttcctgcttgaccaccaccgataatagttactttacctttaggtactcctggaacaccacctagtagaattcccataccaccattaagtttttgtaggaactctgcgccaacttgagctgacattcttcctgctacctcactcattggtgataataatggtaaagatcggtctggtaactgcacagtctcatatgcaatactaattactttcttatcaatgagtgcttgtgttaatttttcttcatttgctagatgaagataagtaaataatactagcccttctttaaaatatggatattcagattcaagtggttctttaactttaataaccatatccacatcccaaacttttgcttgttcagcaacaatctcagcacccgcttctttgtaatctacatcttcaaagaatgatcctgcacccgcattcgtttcaaccaaaactgtatgtccactttctactaaagcgtgcacaccactcggtgacaaaccaacacgattttcattatttttaatctcccttggtataccaattttcataccatccacctccataatcatcttaacgcgaacattttgaaagcgcaatcaaaaatccacaaaattgtaaaggttattacactgacttttccgaaaattgtggtaaaatataattaagaaagaacaaggaggcacttactatgattacttacaaaaatattttaatcgcagttgacggttcacatgaagcggaatgggcatttaacagagcagttggtgttgctaaacgtaacgatgcgaagttaacaattgtgaatgtaattgattcaagaacatattcttcttatgaagtttatgatgctcaatttactgaaaaatctaagcattttgcagaagaattattaaatggttataaagaagtagctactaacgctggtgttaaagatgtagaaacgcgtctagagtttggctctcctaaatctatcattccgaaaaagcttgcacatgaaattaatgcagacttaattatgagtggtacgtctggcttaaatgctgtggaaagatttattgttggttctgtatcagaatctatcgttcgtcatgcaccatgtgacgtgttagttgttcgtactgaagagttaccagcagacttccaaccacaagttgcaacaactcaattacgtgaaaaatatcaaaattaaatatagatgatcattagataactacttgatcattatgaaccaagtgcaactttctgcacttggttttttatcgtttataaataaaactcacttaataatgttgtcataatcttcttcgactacttaattctttaagatattcgtgaagagagacattacactagttaattttcaaacaatacaaaaagcgtctagctcctacatataattgtagcggagatagacgcttaatatttattaaaaatttattttaaaccaccgaatgtcataacatcacgggcaatcatactttcttcatctgttggaataacgacaactttaactggtgaatgaggatagttaataaatccttctttaccacgtagtaagttttcatttttcttaggatcccagtaaacacccataaattctaagccttcaagaacttttgcacgaatttcaactgagttttcaccgatacctgctgtaaatacgataacatcaacaccatgcattctcgcagcatatgatccaatgtatttgtgaattttagaagcaaatacatctaaagccatttgtgaacgtgctttacctgattcagcttcttcagataagtcacgtaaatcacttgatgtacctgataatcctaataaaccagattctttgtttaagatttctaatacttgttcagcagttttgccagttttttccataataaatggaattaaagcagggtcaatattaccagaacgagtacccattgttacaccagcaagtggtgtgaagcccattgatgtatcaatagatttaccgccatcgatagctgcaattgatgctccattaccaatgtgacatgaaataatacgtaaatcttcaattggcttatctaacatttctgccgctctttgtgatacaaatttatggcttgtaccatggaaaccatacttacgaatgccataatctttataataatgatatggcaagctatatagatatgctttttcaggcattgtttgatggaatgctgtatcaaaaattgccacatgagggatatttggtaataatttacggaaagcacgaatacccatcaagttagctgggttgtgaagcggtgctaattcgcttaattcttcaatttccttttcaacctcatcagtaatagctactgattcagggaatttttcaccaccatgtacaacacggtgacctgttccatcgatatcgttaatatcattaataatattatgcgctttaaaagcatccagcatgatatcaactgcctcaacgtgatccttgatatcttgtactgttttaactttttccccgtcgacttcaattgtaaaaattgaatccttcaatccgattctttctactaaaccttttgttactaattcctcttcaggcattctaattaattgaaattttaatgatgaactaccagcattgatagccaagattaattttgacataagtaatgatcctccatcgtttgctttttatactatttcatttttcattttatcattcatacagttttatgactatactattacagattattttttaggacgatttgtgtccatccactgatttaactctgtcataaatccttgaaattgtgaaggatttttgaaatcaggaatatttgccaataatacttcaactggctttgtttcgcccgattttttcttttgtaaaattaatatagattttcgtgctttttcatttttaaataaagttggtggtaaatttaaaaatgcttgcatctctgtctctgttgcaatatatttttcaagctgttttacatgttcacctgtaaaaatattacttggtaccactagaaaggcgtatccagcatcttttaatgtatttattgcttgttctattaataaataatgtgaataactatgtccttcttcgaaacctagcttaaactccttgcttctttcgtcaattggataatagcctactggaaaatcaccaataacgatatctgcttcttctaacggtagtggcataatggcatcttgaggatacacatcgaaaggaatttctaagaaatttgctaaatgtacactaacacgtgataaaactggatcaacttcaattaaatgatgcataaccgcaatttcaggtaacacttcttttacagtagcacttaaatgaccggcaccacttgcaatatcaacaatatgtaattcttcttggttgttcataaatcgctcaactaaaaatcctaatatcaatccaattgaatctggtgtaatttgatgatttgcttgtattttttcttcctgcattaaacttaaatatgcaaattggaatgctttacgtcgatcttgtaacgtcgattgttctaacaatcctctttcatttgtataaacttgttccattgctagcccaagattttcaataaaactttggccattttcattatttaatgttttagctttttcatctaacgtatgaaacaagcgttccataattgtttgttgttctgccatattcgtccctctccaataaaaagtgcccataggtcttagcaatcatagaaaacaattctattttaatgctgttgacaacgatggacacgatgtatacattttaagatttatctctttaatgattaaatatttttgtatgcagctaaagcagcatcaaaatctgggaaatcagtaccttcactaacgatttctttataaacaactttattatctgcatctaatacaaatactgcacgagctaataagcgaagttcttccataacaacgccatagttttcaccaaatgataagtcacggtggtcacttaatgtaatgacattgtctaaacctgctgaagcgcaccatcttttttgtgcgaatggtaagtctgctgagattgtaagtacaatcccctcttctttagaagcttcagagttgaatttacgagtctgctgatcacaaacacctgtatcaattgatggtaccacactaattaatttctttttaccagcataatctgctaatgttacttgatttaagtcattatctaacactgtaaaatcaggtgcaaaatcaccttcattaatttgttgaccttttaagtggattggtccacctttgaatgttatttcagtcatatacttgacctcctgcatttaaaattctaactacatcatacgacaatttatggtttgattacaattttcatgctttaatcaaaagcaaatttaattttatacaaattgttgaatataatcaaaagcattttttaaaattaaaatcgcagtaataataataaataatacttttacatagccaacaccttgtttaatagcaaaatgagccccagcatatgacccaacaatcatactcgcagccataactaaacctattacataatctacttgtcctaataccataaataatacaagcgcacctatattagaagcaaagttcaaaactttagcatttcctgcagcgcttaaaaaatcaaaaccaaagattaacaatacaaaaagcataaatgaacctgttcctccacctacaaatccatcataaaagccgattaatataaaaagtgctgcaaatagtaaggctttcttaaatgtaaattgagtaaacgtacgtgtattgccccaatcttttttaagtaatgtgaatataaacaccgacgaaagtgcaataatgattaaaggtttcaatatttgtgacggaaccatcgttgcaatatatgcaccacatgcagatgccaaaaatacaaaaccaaataatttggcaacaacatataagtccactttaccggaccttataaattttatcgcactagttaaagaactaaatgaacttgccaatttatttgtacctaaagccacagatggtggtagaccgattgctaataatgctggcgtagaaattaaaccaccaccccctacaaccgaatctataaacgccgcgataaaaccaaacaaaattatgattataatcatcgttaaattcaaatccatagtttagcatccccttatgtttaaatttactctaggattttatttataaaaagtcgtttattaattggtttgtttgctgttctttaatagttttataatcactagttattacaagtgtttcaatattttcaacagcacgattaatcatctcttcaaaatcaaagacactttcatattgaactaccttatcaaagtttggttcggttactggatttttaggggtgaaaattgtacaacaatcttcaaatggttgaatagatgtttcaaatgtaccaatttctttcgatttaataataatttcttctttatcgtaagttaataaaggacgtaatacaggggtagaagttacgttattaattgcatacatgctatgaagtgtttgacttgctacctgccctaggttttcaccatttacaatagctaaagctcctatttgatgtactaatttatcagcaacacgcatcatcatacgtctcgttgaagtcattgtatatcttggatgtacaactttatttacctgtttttgcaattctgtaaatggtacaatatgcaatttaattggtccaacacgttcagctaaaatacgtgtcaattcaataactttttcttttgcttgatcacttgtaaatggtggactatggaaatgaatcgcttcaattgttacgccacgtctcatcacttccatcccagcaactggtgagtctataccgcctgaaagcattagtaacgtcttaccaccagtaccaactggtaatccgcctgaacccggaacaacttcttcatacatataaattgcatctaatctaacttccactcgaatttcatgatctggacgtttgacattaacagaaacattttcaatttgtttcaatacggtaccacccaattcacgttgtaattcatacgtatccattgggaaatttttatcggcacgcttcacatcaattttaaatgtgctgttttcttcaaattgctgcgcaaatttaattgccgctgcactcattgcctctaacgttttttctacttttaatactggactaatagatttaataccgaaaatttttgataatcgatatgttatttcatttatatctgcatggtcttcaagttcaatatacatacgatctcgtttgcctttaacgacaaacccatcaagtccttttaatgacttatttacattatttcttaattgatttacaaatttctttctatttgaaccctttaatgttaattccccgtatctaacaagcaagtgatcatacttcattattttagcaactccttaatttcctcataaatgatgataaatatttctttaaatcttgctatatcttctttagttgtagtagccccaaatgataatcttatactaccttcaatagacttgtctgataatcccattgcagccaatacttcatttaatttattacgtttagatgaacaagcactcgtggtagatatcataatgtcatattttgaaaaagcattaactaatacttcaccttttacgccaggaaaactaatatttaaaacgaatggtgagcctgaagttgaagaattaatataaactccatgatatttatttaaaaattgacggacgtcattatttaaatcagtaacaaatgcattcaatgcttcaaggttttcattagctatcttcatcgctttaaccattgcaatatcatttggcaaattaactgttccacttctaacgccatattcttgaccaccaccatggacagttggttcaacattttgaatttgatttacaagtaagacgccttgaccttttaaaccattaaacttgtgtccacttaaactaatactatctacgttattgaaatccattgaaattttgccgaatgcttgaaccgcatctacatgaaaatgtgccttaggataattttttataacttcagccatttgtggaataggctgtatttgtcctgttacattatttacatacatacatgttactaaaccgactttgtctgacattaattctttgaagtgttctaagttaatactgccatctttctttacatcaacatatttaaccttaaatccttcgtgcgcttccaaatatcttacaacctctaatacggatggatgctctaacacggatgtaattatttccttagctgtatcaaatttacgataggcaataccttttaaagcaagattattggattcagttgcaccactagtgaatacaacatcataatttgtttttgaattaatcattgcattaatttgagcttttgcttgttgtagtaattgatttgcctgcaaaccagctttatgcggactattcggattataatacattgattgatttacttttaaataagtatctaacacttcttcaaatgctttcgtcgttgccgcattatctagatatatcaaaataaacacttctctttcattaatcatcaatcgttaaaattgtttttactcaagcattatactattatcacataaaaaataaaggctataacaaaaattaatcatttttccacccattttaataagaattgaactatttcactctatgcatagcacgatgcattttcactacctacattaatttaaacatcacatttgattacgtttgtctttaaacaattgctatttatatttattgtccctttcatatatccatataaaaaagaagctagacaacgtatcgttggctaacttcaattattaaactcatcagtccaatttgacagagtgctcatattatttaagtataactacatactagtttctattgcttaatgacttcttcttcaatatgtttagtgacacctggctcaacactttcaagagcttgctctgcaatttcaatcgcacgcttatagcgattatttttaaataatcgttcagcttcatttaagctcttatcaacattgctatagtccttacgatatctatttccatattgaattaatttctctgcataaacagcattaacaagaacatcatttgcttcatcttcaaatgtattcatttgaatcacaattttagacactttatcttttaactgtttaacgtgtattgggcgttcactaaattgttcgttaacatcacgaacttcatgatcaatttcatttttcatgatgataaatctttcaggaacgcttgttaagttagaagcaagtaatcgacgatacacttcttctttcttagattgtactcgtaacagattgtcttctgcttctgcttcatcttcacgcaattgaatcagatgattttgcagcttttcttgtttgtcattaataactgtgacatgatcttctaaatattgtaaattatcctgaacctcgctatatcgtacagcagatttcgacatttcttttaaaatatcatcatatacagaaattaaactttgaatttcattttcaaattgacgaacactctgagcatcagattcatttatatagtagttttcacgtacatattcaatttctgtttgcaatgtataattcatgtctttagctttgaataagttatccgtaatgatatcttttgtttcttcgacatcatttttagctttaacttcatgttcaattaaatcatacatgtcatctaacttatcattgatattagctagtttatcattagcttcttctaattctaagcgactaattaatggttcaacgaaactaagctctgtttttaagctttgtaatgtactgtctacttttacgtgatccagatcatacccttcaactttaagatcacggcaaccatattttaaatcttggaattgaccaggtaattctttttgagtttctctaattaattctggtatttcttccatataaaatcttagctgtttcatttgttcattcaaggcagctatatggttgtgcgcttgtacataattaccatcagcttttagtacttcatattgctctaaccttggctcgaatttttcaatttcagtttcaagaagacttgctgcctcaccaaattgatgacgatttgctaaaacatcacgtttcatttcacgataatcaaccttacatttgtcatataattcatcattatctttgtataacgcaataatttcatttacatcttctaattgttgctgatagctttgttcgtaactatccatcaactcatttgcatcatcaatttcactttgagatgcgttgaaactaaatttatctaataaagcctcagcattatggattttttcttccacaggagctagatacttatttgtactttctacgttgtcctttttcattgcatcgtatttcgtttttgtttcaccttttaaattcaacttagataattgtgcaaggttttgatcaaaaggtaacgtctcaatttcatttttacgttcgattgctttttcaataatttgtcgtttatttgaacgtaaatagaataatacacctacagcaatcaatataatcacaattattgccaaaatgatatataacaccatatgcttctcctcctaatttatcattactattataacgtaattttgcttaaggataaattataaaatgaatttattgccataatattttcgaaattctatactattataaaatctatgaaaataagaggttttaaatatgacaacaattaagccaacaaactatacattattaaagaaacaagcagcaagccttattgaagatgaacatcacatgattgctattttaagtaacatgtctgccttattaaatgataatctagatcaagttaattgggtcggcttttatttaaaagaacaagatgaacttatacttggtcctttccaaggacaccctgcttgtgtccacattccaattggaaaaggtgtatgtggtacagccgtttctgagcgccgcactcaagttattgctgacgtccaccaatttgaaggacatatcgcttgtgatgctaatagtaagtctgaaattgtcgttccaatttttaaagacgataaaattatcggtgtcttagatatcgatgcccctataacggatcgatttgatgacaatgacaaggaacatcttgaagcaattgttaaaattattgaaaagcaactcgcataaaaggacatcagcattttcaataaagtgttgacagttagcaggaaaatgttacaataaactttgtgtgaattaacgaaagtagcagttgtatattattgagcgctatgttgttcccaatgcggacgtgtcacgtaactgtcgctataaggtgaagacacataaaacaatatatcttagtaagcatgcaacactcttttttgtttattcataacaacaaaaaagaattaaaggaggagtcttattatggctcgattcagaggttcaaactggaaaaaatctcgtcgtttaggtatctctttaagcggtactggtaaagaattagaaaaacgtccttacgcaccaggacaacatggtccaaaccaacgtaaaaaattatcagaatatggtttacaattacgtgaaaaacaaaaattacgttacttatatggaatgactgaaagacaattccgtaacacatttgacatcgctggtaaaaaattcggtgtacacggtgaaaacttcatgatcttattagcaagtcgtttagacgctgttgtttattcattaggtttagctcgtacccgtcgtcaagcacgtcaattagttaaccacggtcatatcttagtagatggtaaacgtgttgatattccatcttattctgttaaacctggtcaaacaatttcagttcgtgaaaaatctcaaaaattaaacatcatcgttgaatcagttgaaatcaacaatttcgtacctgagtacttaaactttgatgctgacagcttaactggtactttcgtacgtttaccagaacgtagcgaattacctgctgaaattaacgaacaattaatcgttgagtactactcaagataataccgttcaatacaaacacccacaattgtgggtgtttttttatattattttaaaatgatagattcaagattatatggagccaccctattttacaatcaacttagaatttacaagtcttatttgttgaattatctttagtatttcatcattagtttttaaaattatcaattgcgatatacgaatccttatccctctatcaaataaccattcatcgtcttacttaataaataatttcggatcatctgtaattaatccatctacacccatttgtcttaatttttccccagttttcaatttattaactgtgtatggcaaaacctgtaattgatgatgatgtgcttcatcaacaaattttctggtcactaatgcataattaggattaacataactagcaatttgagcaattcttgaaaaatttggctttttataccaatacttacgtttactacaaagcacacctaattcatatatactgcccaatgtgtttaacttttcgatgcattcgatatcaaaagattgtataactacttgtgtcgcatcgactttcttttcttccaaaaatgccagcaatttacattctattcctggatataaattcggacttttcaattcaatcaatagctttttatcgaactttaagcataatgaaagtacttcatctaacgtgggtattcgttctcccttaaaagcaacatctttataactaccaaaatcaaatgattttaattgcgataatgtgtaatcagcaatacgccccttaccatccgatgttctatcaattgtttcatcatgtatcacaacaaaatgttggtctttggtcaaatgaacatctatttctaacatagcaacattgagccccattacctctcgataaccgaccattgtattttcaggaaaatctctcggcaatccacgatgagaaacaatttgtaattcatctttcagtttattcagagtcattgataagtcacctttctgttaaactttgataaactattctaaaattaaactatcacaattatattggaggttaaagcaattgcatcaacatgactttaaagtccaaacttcttggcaaggtggtcgtaacaacgtcggaaacgttcaaagcgacatactttcagagaatatttcaatacctgcttctttaggcggtgttggtattggaacaaatcccgatgaaatgttagtatcagccgcttcatcatgttatatcatctcattagcagctactcttgaacgtgcaaagttcacagatatttcaattgaacaacaatcgattggaacagcttgtttaaataatggaaaattcagtatgtcaaaaattgtgcaccatcctcacattcaaattccaagtgatcaaatagcacaattagaaaagcgattaccaaaattgataacaattgcagataataattgcatgatttcaaatgctgtaagaaataatgtggacataaaaatctatcccatcattcagtccaaataaaatcgttaagtgataacatttgttcaacaatatagcgttatcacttttttaggcttttaaattttcagaaaatttgctaaaatagtgaaatcttatttataggaggcatataaatgtattatcatcaaccgttgttattaacacctggcccaacccctgtacctgatgccattatgagagaaattcaagcacctatggttggtcatcgttctaaagattttgaagacatcgcacaacaagcatttcaaggtctaaagccaatatttgggagtcaaaatgatgtacttattttaacatctagcggtacaagcgtcttagaagctagtatgttgaacattgtaaaccctgaagatcacttcgttgtcattgtttcaggtgcctttggtaaccgatttaaacaaattgcacaaacttattacaaaaatgtgcatatttatgacgttacatggggagaagctgtagatgtcaaagatttcatcaattacctttcaactttaaatgttgaagttaaagcagtatttagtcaatattgcgaaacatctacgacagtgctacaccctattcatgagttaggaaatgccatcaatcaatttaatagtaatatttattttgtagttgacggcgtaagttgcattggtgctgttgatgttgacattaacaaagataaaattgatgtacttgtttctggtagtcaaaaagcaattatgttacctccaggattagcttttgtagcttatagccaccgtgcaaaagaacgtttcaaagaagtaactacaccaaaattttatctagacttaaataaatacatttcgtcacaagctgacaattctacaccgttcacaccaaatgtgtctttatttagaggtgtaaatgcatacgttgaaaccgtaaaagcagaaggtttcaatcacgtaatagcacgacactatgcaattagaaatgcattaagaagcgccttaaaagcattagatttaactttattagtcaatgataaggatgcatctccaacggttacggcattcaaacctaatacaaatgatgaagtgaaaataatcaaagatgaacttaaaaatcgctttaaaataacaattgctggtggtcaaggccatcttaaaggtcaaattttaagaattggtcatatggggaaaattagtcctttcgatattttatcggtagtatctgctttagaaattattttaactgaacaccgtaaagttaactatatcggtaaaggtatatcaaaatatatggaggttattcatgaagcaatttaatgtactcgttgcagatcccatatcaaaagatggtatcaaagcattattagatcacgaacaattcaaagtagatattcaaactggcttgtccgaagaagtattaatcaaaattataccttcataccatgctttaatcgttcgtagtcaaactacggttactgaaaatatcataaatgctgctgattctttaaaagtaatcgcacgcgccggtgttggtgtagataatattaatattgatgctgcaacattaaaaggtattttagttattaatgccccagatggtaatacgatttcagccactgaacattcactagcaatgttattatcaatggctcgaaatattccgcaagcacaccaatcacttacaaataaagaatggaatcgaaatgcatttaaaggtactgagctttatcataaaacattaggtgtcattggtgctggtagaattggtttaggtgttgctaaacgtgcgcaaagtttcggaatgaaaatactagcttttgacccttacttaacggatgaaaaagcaaaatctttaagcattacgaaggcaacagttgatgagattgcccaacattctgatttcattacattgcatacaccactaacacctaaaacaaaaggcttaattaatgctgacttttttgccaaagcaaaacctagtttgcaaataatcaatgtggcacgtggtggtattattgatgaaaaggcgctaataaaagcattagacgaaggacaaattagtcgggcagctatcgatgtgtttgaacatgaacctgcaactgattcgcctcttgttgcacatgataaaattattgttacacctcatttgggtgcttcaacagtcgaagctcaagaaaaagtggcaatttctgtttcaaatgaaatcatcgaaattttaattgatggtactgtaacgcatgcagtgaatgcacctaaaatggacttaagcaatatagatgatactgtaaaatcattcatcaatttaagccaaacagttggtgaattagctattcaattaatgtacaatgcaccaagctctattaaaattacgtacggtggcgacttagcctctattgatagtagtttattaacacgtacaattattactcatattttaaaagatgatcttggtcctgaagtcaatattatcaatgctctaatgttgttaaatcaacaacaagtgacattaaatattgaaaataataaagcagagacaggttttagtaactacttagaggtagaactatcaaacgatagcgattccgttaaagttggcgcttctgtctttacaggtttcggtccaagaattgttagaattaataatttttctgtagacttaaagccaaatcaatatcaaattgtgtcatatcataatgatactccaggtatggtaggtaaaactggcgcattgttaggtaaatacaatatcaacattgcatctatgactttaggtagaactaaagcgggcggagatgcgctaatgattttatccgttgatcaacctgtttcaaacaatataattgatgaacttaaacaagttggtgaatacaatcaaattttcacaactgaattgacggtacagtcataaacaatttatgtaaattcaaaatgccaagaagacattggattacttccattgcttcttggcgttttttcattattaatttcattgtaactcaatatgaaaccttggttcaatcattcacttcaagttatgctgtcaaacaacaatcaaattacaaattatctagtacacctctaagttcacctaaatgattaataacatagtcggcatgatgcgcttctaactcacctgcagcatccttaccttttaaacctgttaatgttccaataaacgttgcacctattttttgagcacttaataagtcggctaacgaatcacctactataaatacgtcatctttatttacaatgttatcttgcttattgatataagattcatatttatcgcgtttattaccatataaagctgcgatataactaaaaggatttggctttcctaatggtcgtgcttgcggatacatattctctgcttctaaaacatcacttgctgttgcaataaaatcagcttcaaaatatggtaacaatcctaaattttcaaatggcacaacagtctcagtataaggacgacctgttgcaatacctaattcgaaaccagcaccttttaaatcattcagaagcaccttaacttcatctactggtctcaaaataatttcttgataaatataacccgtcttaaaagtagttcgtgctattttcttttcaacctcttcatacaacttcgatcctaaataccattcttgataaacttcttgcgctaacgtccataatgcacccttcaaactaaataaagtagcatccgaaacatgtaactctgttgttgcaaactcttccaaagcagcataaatattatttttaccaacttttacattatccaaaaattgtaaaggtagttgttcatttaaattaaaacggtctgctaagtttgtgcttatatttttcaacttcaattcgacaggctcatcttgatacatgaatgcctcaatttcttcatgtgataactttttcaaaatatcaattaaatgaatactaaaaacgataaataacatatcccaatttgaattcagccctagcgattttaatttgtttaaaatcttatctttttgaaaaattcgattcctaatgtcttgtatatcgttatcagtcaaagtttcccaatctatatgtgaatgaagacctaaataacacttatccattaataattcatataccgttaatgcagagacatcgaaacaacgttcttcacttaaaaaaacgccatcaacatcaaataaaattttcttcacaatccccactccatttctgaaaattcagatataaatcattctactatttgactaaaaaaagcgcaaaccctattgaagttggatttgcgctttagctgtttaaattttataaatgtttttcaatttcatcagcaacctgctgtacgtgtgtaccgacaataacctgagttgaatgtttgccattaatagtaacaccaactgcaccggcgtttttaatcttctgttgatcaataatagatgtgtcttttaactctagacgcaaccttgttgcacaattagttaaattaacaatattatcttgaccacctaaaccttctaatatttgaatagcatgtttatgatacttactttgtttaatatcattttcaccaggagcaatattatcttttacaactgttggatcaactaattcattttcacctctaccaatcgtattcaagttaaatacttggattactacacggaaaatcacatagtataagataaaaaatacaacaccttgaacaagcaacatcaatggatgatttgataccggattaattagtgataacacataatctatcaaacctgcactaaatgaaaatccagctgtccaatggaatgtagctgcgataaataaagataatcctgttaataacgcatgaacaacatataagattggcgcaacaaacataaatgcaaactcaatcggctctgtaacaccaacgaaaaatgctgcaactgaactcgctaggaaccaaccgtaaacttgttttttctgagtagttttagcagtatgatacattgctaacgcagccgctggaataccgaacatcatgattgggaagaatcccgcttgatagcgtcctgtaataccttttatagcatctttgccactttggaatttaccaatatcattaataccaatcgtatcaaaccagaacacactattcagtgcatgatgtaatcctgtaggaattaataatctgttggcaacaccatatacgaaagcaccaaatgatcctaaaccaactatagattcaccaaattttacaatccatgaataaagtagtggccataagaataacaatatgacaactaaaaatgtacagtaaaatgcagtcataattggaactaaacgtttaccactaaaaaatgataatgctaatggtaattctgtttcactaaacttattgtatgcataagctgctaataaacctattacaataccaacaaagacattgccattattcatcttttcaaaagctgaatttatttcagaagctttcattcctaataaaggcgctaatttcattggtgataatacaactgtaactaaaaaatatcctaacgcagctgcaagcgcgacagcaccatcatttttctttgccatccctatagctacaccaattgcaaataaaatacctaattgctctaaaatcgtagtacctaccgtagtaaagaacattgcgattttcggcgccgcatgaagtgcatttaacgtattaccaattccggcaataattgctgcagccggtaaaatggcaactggtaacattaacgaacgccctaaattttggaaaaatttatacattgaatgtcatccttcttaaaataaggtagaaatataaagattactaatgtaactagaataactacttcgatactccgttatagtcacctaggcatactaaccagctatatttctacctcaagttattttataaactttttactatttcatgcaattcttgttgtaactttgctgttcgtgtttcaatctcttttgtaatgtaatcgatacgctcgtttcgttttaaatctttaggtaaatcgttaatatcgattggtttaccgatatttatgtatgcttgtcctgttaaaagaccatgaatcttagtaggaccaacataagcaacaggtaatattggagacttacttaacattgcaattgttgaagcaccacgtttcaaaggcgcaccttcttgcgatgtgcgagagcctgttgggaagataccaactgtcttattatctttcaacaaattgattgggcgttttaaagtactaggtcctggattttcacgatctacaggaaatgcatttaaagacgttaaaaatttaccaatccatttatttttgaataattcttttttagccatataatgaatttgattaggatataatgccatacctagcataatgacttcgttataactttcatgcgtacaagttacgacatatttactatccttaggaatattatctttaccgattacgtataatgattttgacattttaactaaaatgaaattcaaaatcttactaatcactgaatacattgtgccacctacttaacttatttgtttataacaactagattttatcactatatttttactagaacaagatagtctgaaaatacatctaaagttgtatagtgtattactagcaataattataaaaaaaagacataattaaagcatatataaatcatataatggaggttaagtatgtcagattttaatcatacagatcattctacaacaaaccatagccaaacacctagatacagaagacctaaatttccatggtttaaaacagtcatcgttgcattgattgctggaatcattggtgcacttctagtacttggtataggcaaagtattaaatagtacaattttaaataaagatggttcaactgtccagacaacaaataataaaggtggcaatcaattagacggtcaaagcaagaaattcggtaccgttcatgaaatgataaaatctgtctcccctacaattgttggagttattaacatgcaaaaagcatcaagtgtagacgacttattaaaaggcaaatcatctaaaccatctgaagccggagtaggttcaggtgttatctatcaaataaacaacaattcagcttatatcgttacaaacaatcatgttattgatggcgcaaatgaaattagagtccaattacataataaaaaacaagttaaagcgaaattagttggtaaagatgcagtaactgatattgctgtacttaaaattgaaaatacaaaaggtattaaagcgattcaattcgccaactcttcaaaagtacaaactggcgatagcgtattcgcaatgggtaatccattaggattacaatttgctaactctgtaacatctggtatcatttcagcaagtgaacgtactattgacgcagagacaactggaggtaatacaaaagtcagcgttcttcaaacagatgctgctattaacccaggtaactcaggtggcgcattagtagatattaatggtaatttagttggtattaactcaatgaaaattgctgcgacacaagttgaaggtattgggtttgccattccaagtaatgaagttaaagtaacaattgaacaacttgtaaaacatggtaaaatagaccgcccttcaatcggtattggattaattaatttgaaagatatccctgaagaagagcgcgagcaacttcatactgatagagaagacggtatttatgtcgcaaaagctgatagtgatattgatcttaaaaaaggtgatattattacagaaattgatggcaagaaaattaaagatgatgttgatttaagaagctatttatatgaaaataaaaagcctggtgaatcagtcactgttaccgttatccgtgatggtaaaacaaaagaagttaaagtgaaattaaaacaacaaaaagaacaaccaaaacgtcaaagccgatcagaacgccaatcacctggccaaggcgatagagatttctttagataatttatagacagaaaagtacattaagagcctactcatattcattcctaagaatgtaatgagtaggctctaatttatttagctatgcaattatatttattgatagttaaccataaagcatttctttttaccgcgacgaataattgtaaattcactatcaattttatcgtcagatgttaattcataattaacgtcttgttgtctttcaccgttaatataaatcgcaccattattaacatcttcacgcgcttgacgttttgatggcgaaacaccagtttcaatcagtacatcaatgatattagttgtgccatttgataatgtcacctgaggcacatctttaaacccatcttttaattcttttgctgataaagattttaaatcaccactgaataatgcttgagaaatacgaattgcatcatttaaagcttcttctccatgaataaatttagtcacttcttcagctaatgttttttgagcttcacgtaaatgtggcgcttcatttttagattgttctaagcgatcaatttcttcttttcctaagaaagtaaagtattttaagaatttaatgacatcttcgtctgattggttaatccagaattgataaaattcataaggactcgtcttttcagcatctaaccaaacagcacctgactcagacttaccaaatttcttaccatctgatttagttacaagcggaatagttaaaccgtatgcgtctgtttgaccatacatacgacgcattaattcaataccactcgtgatattaccccattgatctgatccacctacttgaatcttacaattcaattctctattcaaatgaccgaaatcaatagcttgtaaaatcgtgtatgtgaattctgtatatgaaataccatgttctaaacgactttggattgaatctttacctaacatgtaattaacgccgacgtgtttaccatagtcacgtaaaaagctaattaatgaaatttgtcctaaccagtctctattattaacaagcactgcaccatggtctgttccaaattcaaaaatattatgcatttgcttactaataccttcgatatttttatctacttgttcttctgtttgtagcacacgttcttctgatttacctgatggatcaccaatcatacctgtaccaccgccaattaaaacgataggacgatgtccatgttcttgaaaacgtcttaatgttaagaatggtagtaagtgaccaatgtgtaagctgtctgccgtcgggtcagcaccgcagtataacgtcacttgttctttatttaataaatcttcaataccttgttcatcagtttgttgataaataagacctctccattttaaatcttcaattaatacattcgtcattattatttcctcctatttataattatttagtgaatacttgttaaaatactttaaagctttttgaacgtaaaaaaacccttacaacaaatatgtaagggcgcgattgcacgttaccaccaaacttaaacataatcataagataatgttcactctattaatgatacgttcattaataaacgtaggacatgttagttataaaggtgtattcatattattaaaaacactagttcacagcgaccactagctctctgatgatttcaaataatattacttgtccttttatcctattctttatgcattttccctaattataattaacgttaaaataaaagtcaaattgcttaaatatggtatactatacgtaatttaggaggttaaagatgacgaatcaagacaacaatcatcaattgaatcatcatatatatcattttgaaaagatatataaagctatcaaacatgtcattgtttttatatttatgattttcattgccatcgttgctatcgctgtgattgcgatgtctttatattttcatcatttaactaaaacgtcggactcattatcagatgatgctttaataaaaaaagttcgccaaatacctggcgatgaattattagatcataataacaaaaatttgttatatgagtataatcattctcaaaactcactcattataggacctaaaacatcaagtccaaatgccattaaagcattaacgtcatctgaagacactttattttataaacatgatggcatcttaccaaaggcgattttaagagcaatgatacaagatatttttaatactgatcaaagttcaggtggtagcacaattacacaacaacttgttaaaaatcaagttcttaccaacgaaaaaacatatagtagaaaagcaaatgaacttcgcctagcaattagattagaacacctactctcaaaagatgaaattatatatacatatttaaatatagttcccttcggtagagattataatggcgctaatatttccggaattgcatccgcttcatatagtttatttggtattccaccaaaagatttatcaattgcacaatctgcataccttatcggtttgttgcaaagcccatatggctatacaccttacgaaaaagatggaacgttaaaatcagataaagatttgaaatatagtattcaaagacaacattatgtattaaagcgtatgttaatcgaagatcaaatcactgaaaaagaatacaacgacgcattaaaatatgatattaaatcacatttattaaatcgaaaaaagcgttaattgatactcactttttaaagtaaccacaacaatgcatccaaatattaaaaacagcagtaagattattttctattagaaaacgtctcactgctgttctttattttaaatactctaatggaaagccattaaaccaatcaatagtttataacttaattgctttcacattgtctacaaagttaatcatacatatgctatatccagttaattatttagattcttttctgaatttaggaatgaataaagctaacatacctaataacgcatataagccccaccatgattggcttgaagttgtttctccagtttttggtagcattttagattgaccaagtttgttttctttcgatggtgtgctggccttttcttttgttttcactgttttgtcaacagttttatgaatatcactcgatggatgctcggttgatctattgccagcaacttcgcttttattattataattttgtttcactacgtcaagctttgctgcttttccagtatgattatttttatcggcattatgtgctagttgtataaccttgccttcatttttattaatgtctttatcaatatggttattcgatatcattccaacgctattatcaacacccttattagtgtctttggcaatttgagtatccatttcttttaaatcatacttatcgaagtgattgttatccgacatatcggataaatgatcaacatcatgttgcacatctttgtcaacactactatcagcatctttaaccatgtcagattctggttctatcacatctgctttatcagacgcatcttttggatttgttgcagtgctgctattttcagctgtatccgttgcagaaaccttattttcttgtcctgtttgtacatttagcggttcactcgtattattttgtgatgtgtcatcatcttttgtcttgatatcctgatttacaattctgacatgatattgaccttcataaccaatgtttgccacaactactttaacaatcgcattgtaaactgatttgtcaggtacatatgggaaaatcagcgttctagaattatttttaggatctttagaaacagtagtgacacgtttaccttctacaattaaatctttccagtaactgtcatcctttgttttcatcactacatatttttgaccatttaaagttgctgtatagaatggatgttcaacaaatccgtccatgactgactcactattttcttcactttcaaaaacaacaaaatgcgcttcttgtaaatctgttaattgatcatttgtaggtgtaacattttcaaattctgtcactgcagacttaacttgatcagctaactcaactctcgtttggtctaatttctttttatattctgctttatatttttctggcaatttctcttgtaatttttctaattcataaacttgtctttctaacgttttagctttgtgatacggagctaataatttttgtaaattgtatgtttcctcatctacatagtcatctggattattcgtaattggctgtgcaaagaccattaatgtataatcatagtcttcatggaagttctcaccatattcaatagatgacacaattttaacttctctagtaccattagatactgggaaacgaatataggcataatctttatcagaatcatatgatactaattcgactggtaactttttgtcaccttcataaacttcaaatttcttccatgttgaagctgtttttaatcctaattcaattattggtcctatttttgtaaaaatgacagttgctggttcaacagtactagcataatgatagaactgtctttcacctttatcatttttcatttgaaaatcaattggtcgccaatgatcagctgtatgttctttatcgatgatagccgggtttttaattgcatcttgtagtgattcatctgctggcggatattgttggttcccattcgactgattacttgatgtattcgatgcatcgctattattaccattagaatttgtttcatgagctggttggcttgacgcttgatctgcattggctgacgattttggttgtgcaggttgactcatattggtcgttgcctgcgattgatcattagcattgttggtcgttgatgtattttgattagatgtattcgtgtttgtttgattacttgcgtttgaacttgattgatcattcgttactaccgcatcatttgtatctgattttacaagtgaaggatcgttataaataggtttagcaaatactaatttagtataatcataatttgtttcagctccatcatcaatttgagttgaagaaacaattttcaattcttgtgtgccatctgaaactgggaatcgaatataggcatggtcttctggtacaggactatatgaaacaagtctaactggcagtttttgattgttttcatatacttcaaacttcttccatgttgaagcagtattgatgtctaattcaacttctgctttctttttagtgtaatacacatctgctggatctttgatgctgaaaaagtgatagtattgcgtttcattgtttttatctaataattggaaattgacttgttctcttggacctatatcatgttctttattttctaatgcaggatctttaattgcatctttaagtgattcatccgctgcaggataggttttcgcagtgtttgctggttgcgtagcaagttgtgtttgatttgtatcctttggtggctgagttgtagttgcattattattttgattttccgagattttatctgaagtatttgtattttctgctgcttgcgcttgatgttgagaagtaattaaaaatagtgtactgacaatgaccgatgcaacgcctagagttgattttctaatagaatagaaagaccttaattttgggtgatgtttgttcatgttgttaacaactcctataagatgtatttaattgataataattatcaatatcaattattagtgtttaatgtagcttatcccaattaaatattgcaacctattttattaatattttttaatataaatatccattgcatcgctttcctattcttcaagcccactttttatcttcgaatacattaattaaccaccttcaaactttgactttagattcgtcaaattgaatctatttttagcacagcaaaaaaccgaactgctgaaataatgcatctccaacagtccggtctattaaactatttacttatcttgattaaacaattgacatgatgtattagaataacccaattgcatgaccatcatcagtaacatccatgtttaatgctgctggttttttaggtaaaccaggcatagtcatgattgcacctgtcaatgctacgataaatcctgcacctgttttcgcttctaattcacgaattgtaatttcaaatcctgatggtgcacctaacaacgtttgatcatctgagaatgaatattgtgttttcgccatacatactgggtaattatcccatccattttctttaaattgttttaattgtttttgcgctttactgctaaacgttacttttgaaccaccatagatttcagtcacaatcttttcaatcttttgctctaatggtaattctaattcatataaaggtttaaatgaattaggttgatcaatgacttctaatacttcatttgctaagtcaacgccacctttaccacctttttcccaaacttcagttaaggcaattcgtacgttattttctttagcccaagattttacatattctacttctgcatcggtatcatgtataaatgcattaattgcaacaaccggttctacaccgaattttttaatattattaacatgacgctctaaattaacaattcctgcttttactgcttctacattttcttcttttaaattatcttttgctacaccaccatgcatttttaatgcacgaatcgttgctacaactacaactgctgctgggtcgaatccagcttcacgtgccttaatgtccatgaatttttcagcgcctaagtctgaaccaaatccagcttccgttacaacgatatcagctaaatcacgtgctgtttcagttgctaaaattgagttacaaccgtgtgcgatattcgcaaatggtccaccatgaactaatgctggtgttccttcaattgattgtactaagtttggtttaattgcatcttttaaaatcattgcaagtgcaccttgcacttttaaatctgcaactgtaactggcttgcgatctctagtgtaaccaatagtaatacgactaattttatcttttaagtctttaatacttctacttaaacataaaatcgccataatttcagacgctactgtaatattaaagccatcttcacgtggtacaccatttgtaggtccacctaacccaacgtttacatgtctaagtgcacgatcattcatatctaatacacgtttccattcaattcgtctttggtcgattcctaattcattaccttggtgaatatgattatcgataaacgcagacaatgcattattagcagttgtaatcgcatggaaatctccgttgaaatgtaagttgatatcttccataggtaagacttgcgcataaccaccaccagtcgcaccacctttgataccaaatgttggtcctaaagcaggctctcttaatgcaaccataacatttttatttaactcatggaatgcatcagctaaaccaactgtaacagttgatttaccttcaccagctggtgttgggctcatcgcagttactaaaacaactttccctttgttttctcttggcgtaattttattaatgtcgattttagctttgtaatgaccataaggttctaatgcatcctctgaaatgcctaccgatgcagcaatatccttaattggttgtagtgttgattgattcgcaatatctaaatctgataaatgagtcaacttttttcgcccctttttgtttaatttatgcattttaaatatgtaagttgtagctaagaaatttttacttacattcatataataacgaactgttaaaaacttgtcgactaaatcgggttagcgctttcatttttgcaataaattcacttattaaagttttgtattatacaacttttagcacttgatactattgataactatatttttctattatttaaaatagtcatcttccaaaggtcatatttaaaataaaaagcaatataaagatatgccattattgttatgtcatcattttcaaatgctttctacgaaatgatatgacacaagttaacagctctttatattgcttatcgtaaagtaaacgattatttaaacattaacatgaaatatgttgtcaccctttattcttcgaaagaaatcttctataacattcatgtcattattccattgtacttaaatcccctgcatctaaatttaattcccaagcttttaatacacgtctcataattttacctgagcgtgttttaggtaatttatctttaaattcgatttcacggggtgctgcatgtgccgacaaaccttctttaacaaataaacgaatttcttcttttaattcgtctgttggttcatatccttttctcagtgcaacaaacgccttaattatttcaccgcgaaccggatcaggtttaccaataattcctgcttctgcaactgcttcgtgttcaaccaatttcgactcaacctcaaatggtccaactctttcaccagctgtcataattacatcatcaacacgtccttggaaccagaagtaaccatcttcatctttatatgccgaatcaccagatacataccagtctccaataaaatatgatttatatttttctggattcttccagatacgatacatcattgatggccagcctttttttatagcaaggttgcccattcgatttggtggtaattcattacctgcatcatcgataattgcagcttgaataccaggtaatggtttgcccattgagccaagcttgacgtccatcgttggatagttaacaatcatatgtccacctgtttctgtcatccaccaagtatctaacaccgttaaaccgtatacttttttcgcccattttattacttcaggatttaaaggctcacctactgatagaatcgaacgtaacgatgacaagtcatatttctcaacaatatcgtcaccagcactcattaacattcttaaagctgttggtgccgtataccaaatcgtcactttaaaatcttcaatcatactataccactgttctggtgaaaagcgaccaccagctatacaatttgtagcgccatttaaccatggtgcaaaaataccataagatgttcctgtaacccaacctggatctgctgtacaccaataaacatcatcttcttgtatatctaatacatattttccagaaatatagtgcactaacatcgcttgttgaacatgcaatacacctttaggttgcccagtagaacctgatgtataatgtaaaatcaaaccatcatccgactttaaccattcaatgtcaaattcatcgctagcagtttccatcaaactaatgaagtctatgtaattgtcttctacatcctcatctacgactacaatttttttcaagttcggtaatttatctacaggtactcgaggtaacaatgccttattagtaattaacactttagcttcactgttctctaatctatccgcaaccgccttttccataaatgcttcaaataacggcccaacaattgcaccaatttttaaaacacctaacaacgcaaaatatagttcaggtgtacgtgacataaaaataaatactctgtcacctttgtcaacttctgcatgttcagacaaaacattcgctgctttattagataaccgttgcatatctttataagtatacgattcttttctgtgctcatctttgtaatttaacgctattttatcccctgatccttgatctacatggcgatctatacattcatatgccatgttcatttttccagtttcactccaagaaaatgcttgttctacgtctttccaatcaaaagcattatatgtttcttcataatctttaaggttatgtttgccttgcgctcctttgtatacttcgactttcatttgaaactccccctttgttttgtgaaaacgctttcttcctcaatattatacataacatttctaattattcaaaatttttacttttatcctttttctagtattaattattgtaaattttctatataatgaatttaatacaatcatgacgtcgattgaggagttgaaaatatgaatcatttaaagacgtatcaatccgaagattattacattcatgacaagcaatttgttattgaaggtcctttatcacacgaagatttgaaagcgcttactttcgatgcgcatttaaccgcatttagagatgctgaagatcagtatgaagctttgttagaaattacaacattaccagaaggtagaatttatgttgctcgccaagatcaactcattgtgggttatgtcactttccactatcctgatgaaattgagcgctggtctacaggtaaccttccatatttaatcgaattgggggcaattgaagtcagcatcaattttaggcaattacaacttgcagaaaagttaatacaacttagcctttctacaccagaattcgaggattatatcgttataactactgaatattactggcattgggatttaaaaaattcaaagttagatgtatttgactataaaaaattaatgcagcggttaatggcaactggtggacttgaaatattcgctacagatgatccagaaataacaagtcatccagctaattgtttaatggcaagaattggcaaaaacattacattagaacagcaacaagcgtttgatgatattcgttatatgaatcggtttttcttttaatttttggaatatcggagggattatatgcaacaacattcatcaaaaactgcatatgtttattcagataaattattacaatatcgatttcatgaccaacatcccttcaatcaaatgcgtttaaaattaacaacagagctacttttgaatgcaaatttattgtctccagaacaaatagtacaacctagaattgcaacagatgatgaattaatgttaattcataaatatgattacgtcgaagcaattaagcatgcttcacatggcattatcagtgaagatgaggctaagaaatatggattaaatgatgaagagaatggtcaatttaggcatatgcaccgccatagtgccacaattgttggaggcgctttaactttagcagatcttattatgtcaggcaaagtattaaatggttgtcacttaggtggtggtttgcatcacgctcaacctggtcgagcaagtggtttttgtatatacaatgatattgcaattaccgcacaatacttagctaaagaatacaatcaacgtgttttaatcatagataccgatgcacatcatggagatggtacacaatggagtttctatgccgataaccatgttactacttattctatccatgaaaccggaaaatttcttttcccaggctctggtcactatactgaacgcggtgaagatatcggctatggacacgctgtaaatgtcccacttgaaccgtatacagaagatgcatcatttttggagtgttttaaattaacagttgagccagtcgtaaagagttttaaacctgatattattctaagcgtaaatggtgtcgatatacattatcgtgatccactaactcatctaaattgtacgttacactcattatatgaaattccatattttgtaaaatatttagcagatacttatacgaatggaaaggtaattatgtttggtggcggaggctacaatatttggagagtcgtaccacgtgcatggagtcatgtattcttaagtttaatagatcaaccaattcaaagtggttatttaccgttagaatggattaataaatggaaacattattcatctgaattattacctaaaagatgggaagatcgtttaaatgattatacctatgtcccccgcacaaaagaaattagtgaaaaaaataaaaaattagctttacatatagcgagttggtacgaatctactcatcaataagtcacctaatctgcaacgattttaaaagataaataaaaggcattcttccaacacccgtataagtcggggtgttagaagaatgcctcttttttgtgaatttattttgttgtgccacgatattcaattctgtgtggtaaaactacattcggttcttctatcttttcatcgttcatatatttagtaagtaagcgcattcctactgcaccgatatcatataatggttgaataacactagaaagttgtggtctaaccatctcaactaagcgtgtattattgaaactaataatttgtaattcctctggaactttaataccagcatccattgcactatgcatgataccaatagcttcttcgtcactgatacataatatagcatctggaagattacctttcattttagcaaaagcttttacgccttctttataactttcagcacctgtacaatttaatgcatcgcctaattgaagaccatttttatctaacacttcagttaaacctgctaaaacgtcttcttgagcttttttagaatgttctccacctactaatgcaaatgatttagcgcctttttcaattaactctcccgtaatttctttcgcagcttcagtaaaatcaatattaacagatgctatatgtgcatccttaccattagttcctgatacaactacaggtacagatgattgatttatcaattctttcatttcttcagtaattgtaccaccaaggaaaataataccatcaacctgtttacttaataagttattaaaaatttctttttccttttcaggatcgttatctgagttagaaataattgaatgatatttgtacattgttgcaatatcttcaagccctcttgctagttgtgagtaatagatatttgaaatatcagggataatcacacctactgttgtcgtctttttgcttgctagacctctggcaacagcatttggacggtaattcaatcgcttgataacttcgttaactttattttttgtctctgctttaacattctggttaccattaacaacacgtgatacagtggccattgaaacacgtgcttcccttgctacatcatatatagtaactgtcataatttcctccttgtaaacgttttattcattataataacatgttttcatatcattttcatagtttaccatactttaatttacagtaacatatttttgtttggaaaattcaacgaaaatcttgatataaaatcaatgttcagataataacgaacgatatattttaattttatataaacttttttcatttttaattgtaatattttgagaaagccttttcaaacttgatttgtatttgttgaaaaatgttcacattttcgaaacagcttgtaagttttcgctcgctatggctatataaatgttcaatttccaaacttttaaaatattaatcagcattatgactctgtatattttgaacaaacatatgtcccttttcaaatgtagtccattaacataaacaaacatagccactctaagattaacattttcttagaatggctatgatgtactgatgatataggtggtgattttaacttactttaaaacgaaatataaattcacataccttcaaccgtagtcatattattttaactttttagcgttatataaatcagacaaaggctttaattcatcataaaatgcttggaattcatctaaatccatttgttgacccgcatcactaagtgcaacagatgggtcagggtgtacttcagccataacgccgtctgcaccaactgctaatgctgctttcgcagttggtaacatgatatctttacgacctgtactatgcgtaacatctaccatgactggtaagtgtgtaccttgttttaaaattggtactgctgaaatatctaaagtgttacgtgtcgccttttcatatgttcggataccacgttcacataaaataatgttttgattaccttgtgaagcaatgtattcagctgcataaacaaactcttcgattgtagcagataaaccacgttttaatagaataggctttttcgtacggccagcttcttttaataactcgaagttttgcatattacgtgcaccaatttggaatacgtctaaatactcatcagccacttcaaaatcatttggatttacgatttcgctgacaacatttaaatcatatttatctttaatttgtttaagtattttaagaccttcaacacctaaaccttggaaatcatatggtgatgtacgtggtttaaatgcaccgccacgaataaatttttcacctttagcatgtaagtttttagcaacagcttcaacttgttcaaatgattcaactgaacatggcccaaatacaaatgatttattgccgtctccaataatgcccccattatcaaatgttacaatcgtatcttcaggtttcaacttacgtgatacatataaatgtttttcattttcagatttttgtaaatctgtagaggctttgaaaatttctttaaataattgcttaatagtattatcgttgaatggtcctttgttactatcgattaagtcgttaagcatttctttttcacgttgtggatcatagatacgtgtaccttgttttaatttttcttccccaattttttgtgctagttcaccacgtttagataataagtctaaaatttgatgattcagtgagacaatctcacttctgtatgattctaatttattactcatccttactcacctctacgaattatttcaagtatattccactttaaagcaataaaatataatgttaaaaaatattctaacaatatcatatgtatagttcaaccctaaattgacagaaaataattaattttctaactatatgatgcttgactgacatttcgattttctcagtcattgtttgaaagttatattctatattgatatttattagcacatgttaatcaattaaataagtgtcatgattatagcttattttgagtcaacattgctgcttttaagaaaaattttggtttctatcttctattataaatctaaaattctcatacattcaacctaacgcttaataaaaattaacaacctttgtatattaatataaatctatagtgaacatcactcaccaacttattcagctatatttgaattagtgaacgtcattgtacctactaagatccattgtttatttgattatcaaatttgattatcaaatatttttccatcttcagcttaaaatgtgcaatatcactattgtaatctaacgatgttacaaatagcataaatacatggaatgatcgcattgcctttcaaaataaactgatgatatcaaaaaaggtaagcacctgaatgcctaccttttattttgaaattcaatttttaaaaatataatacatagcttactgctatgattgataattaaacgattttagtatgcttagtcattgaatgtacgtttctctattttacttttagctttttcaacttttgcatttgatttttttgatgcatttgatgatttagcatttgttgtttttgaattcttattactagtttgattattcttttgagttgacttacttgaactactttgtttctttgcaccttgtgatgatttcttattatgttgctttttctgaccagaagttttatttgtcgatgcttttgatgcatttcgtttatttgaaggtgttgtttttttagattgtttacctgatttcttgtcaacagctgtattattagttgttttttcatcagctttacgtgtaataacaccattttcgaatttagcttctttttgtttaacagtgtctttattatctgtattaactgtctctgtttctgatacatcattcattttagtaactaattgaggaatttctttcaagtcatttttagcaactgacttttctgcaaataacgcttcagttaattgactctcttttgaacctggtgttaatttagcttgcttctgttttgcagcgtttgctaatctttcagcttgtgactcttctttcgatacgtttaatgtcgatgcttttaattcttcatttgatacagctgcacttttatctgtttctgcttgtgcttctttcttagcttcttgaatctcttgtgcctcttgtgatgtatcacttaaattatttgcacttgcttcttcttttatcgctgcttgttgtgctttcaatgccgctgcttttgattcttcatttgatacagctgcacttttatctgtttctacttgagcttctttcttagtttcttgaatctcttgtgcctcttgtgttgtatcgcttaaattatttacacttgcttcttcttttatcgctgcttgttgtgccttcaatgccgctgcttttgatttttcatttgatacttctgcacttttatccgtttctgcttgagcttctcttttagcttcttgaatctcttgtgcttcttgtgatgtatcacttaaattatttgcacttgcttcttcttttattgctgcttgttgtgccttcaatgccgcttgttcatttttagatttgtttaaaaatccttcaacacgttcttttgtaaaggcaaccgtttcttcaagttgcgtttttctttcttcaaacttttgcgacagttcttgttctttgacttttaaatcatctgctttttgataaactttatttttaaaatataagcctaaagctgaaccaacaagcgcgccagttataaaactaacaacaaaatctttacggtttggtaatggttcattttgataagtgtgtttattttttaatgttcttttattattttgttgttgcgtcatttgtatatcctcctataacaaatgcacttaaataagtaacaacctcatttaagtgcatttgtttaattattaattatttatctactcgagaagtatagctatgatttgcatcagttgctacattattagctttgtaatttgcacttccacgacggtagtgtctattttgccatttgtctgcaatttccattgcaacatttgaccattgaacaacttgtgagattttatcttcattttgagaaatattatgtgtaattgaatttgttacacgatctacagagctgtttaacgtttgtactgagtcaccgatacctttaacagcatctacaactgagtttaaacgatctactttgccttggatatcctcagttaaacggtttactttatgaagtaaatctgttgtttcacgagtaataccttgaacttgaccttctacaccgtcaagtgtttttgcaacataatttaagtttttcttaacagaatttaatacagctacgataccgatacataagattaagaatgcaatcgcagcgataattccagcaattggtaaaatccaatccattaaaaacgcctcctaattaacatgtaataatgtcattaataataaatacccatactactctattataaacatattaaaacgcatttttcatgcctaatttatctaaatatgcattttgtaatttttgaatatcacctgcacccataaataaaataacagcattatcaaattgttctaatacattaatagaatcttcattaattaacgatgcaccttcaattttatcaattaaatcttgtatcgttaatgcgccagtattttctctaatcgatccaaaaatttcacataagaatacacgatctgctttacttaaactttctgcaaattcatttaaaaatgcttgtgttctagagaaagtgtgcggttgaaatactgcaacaacttctttatgtggatatttctttcgtgctgtttcaattgtagcactaatttctcttggatggtgtgcataatcatctacaataacttgatttgcaattgtagtttcattgaaacgacgtttaacaccaccaaacgtttctaatgcttctttaatatttgtaacatctagcttctctaaataactaatcgcaattacagctaacgcatttaaaactgtatggtcaccatattgtggagacaggaagtgatcataaaactcaccatccacatacacatcaaaagcagtacctttatccgtaatttgaatattttgagcataaatgtcatccgaatctttaaatccatagtaataaattggaacatctgcttcaattttacgtagatgttcatcatcaccccaagcaataataccttttttaacattatgtgccatttcttggaatgcatcaaagacatcattaatatctttaaaataatcaggatgatcgaaatcaatatttgtcattattgcgtaatcaggtttataccttaaaaagtgacgtctatattcacatgcctcaaaagcgaaataatcactttcaggcaatcccatacctgtgccatcaccaattaaaaatgaagtctttttatcaccattcataacatgtgataataaacctgttgtagaagttttaccatgtgcaccagttacagctactgaagtatattgatcaataatctgtcctaaaaaatcattataacttacaacatctaatttcaattgatgtgcacgtactatttcttcatggctactcgcgaatgcattaccttgtataactaccatatcttcttttatgttattagcatcaaatggtaatatttttatccccttatttctaagagcaacttctgtaaatacgtagttctcaatatccgatccttgaacttcatgtcctaaatcatgcatgatttgtgctaatgaactcatgccagaacctttaattccgacaaaatgatagtgtgtcattatataaaactccttactcataattattctttatttaaatctgcttccgtaacataaacatcccttggttttgaaccattagcactcgaaacataaccgagttgctctaattgatcgataattcttgctgctctattatagccaatttggaaatgtctttggattaatgatgttgaaatatgtccttcattaaccataaatgcacaaacatcatcaaataattcatcttgtgattgtgtttgtgtttttttcaacaattctttttcttcaaatagatagtccggttctctttgttgtttgataaattcaacaacatcatcaatttcgtcatcagaaacaaatgtaccttgaactctaatcggtttattcataccgctaccaagatataacatatcaccatatcctaacaagcgttctgctccaccactgtctaatatcgttctcgaatctacacttgatgataccataaatgcaattcttgttggtatattggctttaattaaacctgtaattacattgacagatggtctttgcgtagctactaacatatgaataccacatgctctcgctttttgagcaattctagcaatagactgctcaacttcttgcggagccatcatcattaaatcagccaactcatcaattacaatgacaatttttggcattctttcatcatatggtgcttttttgttaaatgctgttatattacgtacatggtaatgtgcaaataacttataacgtctttccatttcttctacggcccattttaaactctgtgtagctgctttgacatctgtaattaccggtgcaactaaatgtggcaaaccattataaggagctaattcaaccattttcggatcgataagtaataatcttaattcctcagggtgatttttatatagtaaagacatcaaaatactattgatacaaactgatttccctgatccagttgcacctgcaattagtgcgtgtggcgttttagcaatatccataagtaatggttcattattaattctataccccattgcaactgttaatttagattcagcatttttaaaacttggagattcaataatagaacgtaagttgaccgtcgttggattttggttcggaacttcaataccaacacgactagttcctggaattggcgcttctatacgaatatctttcgctgccaatgccattttaatgtcatcttgtaatgccgtaattcttgaaactttaacacctttttcaactgataattcaaatcttgtaacacttggaccttcagttacatcttgtacttctgcaggtacattaaagtaaaataatgcgtcattaagttctttctttttatctgtaatccagtcctcgtccggctcaataacttgtggttcttctagtaatgaaacacttggcaatttaatatttgggcctttacgaatcatcggcttagatgtttgtacagcttgatttgttccaacatctggttggtttgtccgaggtctattttcattagctgtatcttcattttggtttgaaaatgaaggctgtaaatctttttgttgatcatcattatcttgttgttcactagtattgtttgtatgtgttgtttcttcgctttcttcagttatgtcgcttacttctgaaactgaagacgaagttgattgatcaacttgctcattttccaattgattatcatcttgactttcttcaaatatttccgtttgagttgaatcaacagaaggtttctgctctgaatatggttgtgcattttgatattcattttctgtttctgcatgaccaataagttgattgttctcaacattgtttgatgttatattatttattttatatgcatttgtatttgactcttgtgattcagagcttgatgatggtgtggcttcactcgcagtcttgctttcactcacagcttgcttactttgtacaggctttaattcaggcacattgacttttgaatgctttttacgatccatcatacgctttttatcagaaggcgtcatgacaacattaaatggccttttacttaaagttgaaaccttttcagtctgtttctttagatttacgttttcaatagttttctcttcgacattttgttcactttcagctgcttcgttttgcacactttctgtaacttctgcgttttgcttttctatttcattcatgtttgaatcttcaacaacatgaccatcattcatatcattcgttttcaatgagttgacacttaagtttgtttggtcatcttttttatgacgcggcgctaattcaatttcattatcaaccgttttatcgatattattaacttgagattcagttactgcgtgcacttgcgttttaggagcgtctacatgcatttcagaggcgtttctattggtattatcttcgctatttgaagtagtatcctcatctacttctgtatcatttaattcataaaattctgcatcatcgatttgacttcctgaatattcttctttattcgttgctccatcttcttctgaatcagcaattaatctggattgattttttagttcatcttgttcatttacttcaacgttatgttgtagtactgattgacgttgagacgttacatccgaaaccgtaacttcatcatctgacaattgttgtgttgtcgatacttgattcaaactaacttcctcataattgtatggactttcatctacatgagcgtcattagtgtcttcattttgtatcgacgcttgtttattttcatcaattgatacagcttcattctctattccatttgtatgatgctgactagcctctgtactattatctgttaagtcactatcatcatttaatgaactatcaccaacatagcgttccgcttgtttagcatacatttcatcaattgcacgttgtattgcatcttgctcttcgtttttatgttcttcacgcttttgttgcaacgcttttttaaatcgacgcttttgaagcactttacgttctcgttcacgtctaatttcttcaacaatttgtgaagcatagatgttttcaattttgatagtattatcaacttttgaataattaggcgttgattttgttgttgatgatacattttcatcagatgatttagatgcagttccttgtttgacaacactatcatcttgtttctcgtgttctaattgtttattttgagacgtttgcgtcttagctacatatttatcatatttttgtttatttgactcaactttttctgaaggtttacttacagggatacgaccattttctaactttttaggtttcattgtgccaaaaatagctgacggtacctctgaagtcttgaaactttctttgtgataatctggagttgaatctttagcacgatgatttgtagtattagaatacatattgtgtgtttttgacttgtgcgtttccttctcaataccattaattgcagaaacatatgtacctggcttattcgtatggtaatgtgaatgatctttatattttatactttgctgtgatattttagaattcccacgttgttcactataattttgttcttcagttgtttgatttcttctacggcgatgtcgtttttgtgaacgagaatcgtggctttgtttgcgatagtctcgatggtattgttctttttcatctgaaatagtatctgcagattgttcaacattttcattttcataagctacgctcataggaaaacggaatttccccctcggacgactataaatatcattattttgaggcagtaatgagtcatgatcgttatctatattttgtgattcttgacgtctttttttctttctatgaatcaagtcatcatttgaatcattatcttcgccgaataatttatcaaaccagctcatattttcactaccttccttaattattcaaaaaatgcttgtccaatttcatagctgtcatttaataccataatacctttttcttcaggtgcattaggtaaattcaattctttcattgaacaaatcataccgcttgaggcaacaccacgtaattcagcatctttaattaccataccgctaggcatcactgcacctactttagcaacaacaactttctgtccagcttcaacgttaggcgcgccacatacaatttgtaatgtgtcatttccaacatttacatttagtacacttaatttatctgcatcaggatgtttgtctttagtttcaacgtagccaactacaaatttcggtgatagatcagcatttaatttataatcaaaaccagcttctgaaatacgcttttggaatacatttacaagctcatcagttaatttaatatgacctatttcttcaattgatatatcttttgaaatttcaaaaatattataacctacaacattaccttcattagtaatttcaacaacattaccttttttattgtagtttaattcaccttcaactggttcaatttgtaaaaatgcgacatctcctacatatttaggattgtaaaataaattcattatgacaaaactccttatccaattatttctatttatctttattaaatttacgacgatttgcttctaaacgctgaatcacgtttggatctcttttttgtttattatttttacctaaaataaatatcggttcaagatgaccctgtttatatccaaaggataatgatgtaattggaactagacctttagtgaaaaattccattgttaaatgtgccatcacatcatatcctgttttattgcgtatgtctgcaataattaacacatcttggtgtggcactgctacgagcatttcgccttgacattgcgcctcaatttcatttaaaaatgcagtatttagtatcctacttgcatcatacccgtcatttgagttaataaagtaaaaaatattaccttttacttcatcagtcgtatatgaattagacaattttctaacattaaacagagacatttctcttatttgttgttcagttaacttcaaatccactaacatgctttcatcaattagacgatatgattttcctaaatcgactgcataataaaccgctgtttctgcagtatgctcatcatagataaaaggaacaccttgtttagtttttttatcaaagctagtcgctctaatgacaggcataatttgactagatgatatactctcaagggttttatctgccatttgtgcaatagcttcatcaacgtaataaacaatttcatctacaattttttcttttttatcttcatattttgcgactatagcgttaagtttaatcgtgatacctttgttattatctgttcgataaatacgcaaagtttcttcttcacgattaaatttaaattcaacgtctaaatggcttaaacgttcctttaatttatctctcatttgaaaggtattcatatgtaacactcctaatttcgcaccttataatagtttacaataaatcaacacatagtaacagagaaaaacgagtattaccccgtttttctctagtctaaattacacgtattgagctaaaaatgcatctatctgttcaattgattttcgttcttttccaatataacttccaagcagttctccatttttatatactagaaaacttggaatccccataataccattttcaatacaaatatccataaatttatcacggtctactgatacgaagtcaaacataggatatctcgcttctaattccggtaaatctggttctatcactctacaatctggacaccagcctgcagtgaattcaaatactgtagcaccttgttttaaagattcaaattgttgttctgattcaagttgtttcatttttatgtctccttaattaatgattatatataactatttagggataataattgttattacccgattatttatattgtaatgtttctatttgattattatctaaattacaaatggcttctgaaagtaaagatctagctgcaaaatagtctcttatatcaaatactgagtctgtactatgaatatatcgtgcacatacaccaataactgcagtcggaataccaatattagctttatgaatttctccaccatctgttccacctggtgacatatagtattgatgttcaatgtcatgtgcttctactaactttaataaatagtctctaaatgcaggctttaaaatcattgtaccgtcttttatgcgaattaacgtacctttaccaagttcaccggataatggttggtttcctttaacgtcattggcaggtgaacaatcaattacaaatgcaacgtctgggtctatcatctctgcagatgctttcgcacctcgtaatccaacctcttcttgaacatttgcgccaacatacaagtctacatctaattctatatcttttaataattctagtatttcaattgccaagacacaaccataacgattatcccatgctttagcactatatcgatgttcagataactgtgtgaatggcgtgtgaggtacaattgtatctcctatatctattccgcgctcacgcacctcatcttcattttgagcacctatatctaatgttaaatctttaatttccggtgcaccttcactaccagtacgaaaatgtttaggtatattagaaacaacaccgataattttatcgccatttctatttttaattactaagcgttgtccttgccaaatatcatttgcaacaccacctaaatttgtgaattgaatcattccatttttagtgatgtttgtaatcataaatccaatttcatccatatgtgctgcaatcattacacgttttgcatttggatttttagattttttcacaccaaaaaaaccacccatacgattttcaataaattcatctacgtacggcgccatttgctgagtcatataattttttacttcttcttcaaaacctggtgccccatgaagctcagttaaagtttgaattcgttgtaatgttacttttttatttatgttcataaaagttctcactccttataagttattatatcatcttcaatatggtaaactaatgatatgaatttgaaatcaagggagcataaatgatgactaaactgaaatatataattccaacaataattgcagtagctattgtaattatttctaccatttcaatcatccaatttattaatcgtaaacgctataatcccgttaaagtacttaatgaagtaaaatcatattttatgaatgtcaaaggctcatatatcgtttatgaaccattcgttcatcctgaaactgataaataccgtttagtttatcaaggtggaattacaactattaaaaatagtcaaaatattcattatgatttttatgcagatgcatatactggtgaagtcattaacattgtagagcgttaatacgaattttatccatatttgatttggatcgtaaaacttaaaaatgagccacgccctaattagtaagataggatgtggctcaattttttatttttgaaaatttgtttagtaatacttctttattttagtgattatcaactaatgtttcacgtaaaatatatgcatctatgttttcaccatcatcgctgtattttacagcaaagtagttttcatcatgataaaacaagaaccaatattgttgctgaataaaatatggtatcatgcgttccttttcacgaatcgattgcataggataatcatcatatgccgttacccatagaggatttttatgtgcagtagtcgggaatatatcacccatatgaactgctttatctccttgacttccaatcgtaatgatcgtgtggccaaagctatgacctccactatgttgcatcttgatacccggaaccggttcaaaatgtttttcgaataaaatcaacttgttactataatcgcctttattcttatcccagtaagttgatttacttcttatattaggtgcaataaactcatgccactcatcttgttgcacaacatgaatcgcattttcaaaaattgcatgtcccgcttgatcagtcaaaccggcagcatgatcaaaatgcatatgtgtcattagcacataatcaatatcctttggcgttaaattataatttgccaaatcagcaattatatgactttcttcatctacaccaaaattacgtaattgcttttcagataatttaccattaccaatacccgcatctataatcaaattatattgagccgtttgaatcaaaattggatgtgtcggtaaattgatttgatttcgttcatttgcattgtattgctttgaccacaacggcttcggaacaacaccaaacattgcaccgccatccatttttgtatttccgccatttagataatgaatagatatatccccgattttcataacatcacctattctttctgtattcgttattacaattagcatgtgtttattacatcatatcactattcataaatacgaacaaaaacgaaacgccccacactaatacacttccaactacttataaagattaatgcaatcatattataagtaaatgcatcataaccatcggactgtaattttaaattaataattaaaatttccaagtaaaatgcaagctttattcttttaaatcaaaggtatttagtatagcattgttcataggcgcaattttctcctttagtttaggtttggtcactttaaattatagaggcaatagcgcttttttgtattaaaaaaacaggaagttccacctttccaccatataagatgaagaaccttttttatattcaaaatcaaaaaaatcgaccagatgaaaagtaaaaaaattttttcatcgtccgatttattatagaaccaatatgctttatctatagaaccattatagtacgaaaaaacacttatgattgtatgtgtacataccctcataagtgctttatttttgtgaatggaatttcgcttccatacgataaatacgtgaccctttatccgaaaatttcttttcatattctgttaaaatattactgccatcgtcttcttgatgtaaatttagatttatttttgtaaaatacattccaaattgagacatactttctaaactgtaagcaaatagtcctctgttatcagttttaaaatgtaaatctccttcatcatttaagatttgttgatacaacgctaaaaacgtatgatacgttaaacgtcgttttgcatgacgattttttggccatggatctgaaaagttcaagtaaatacgcgaaacttcgccgtctctaaaatattcatttaattcaatggcatcattacaaataatctttaaatttgttaaacccatctctttaactttatccaatactttataaacgatacttttctcacgttccattgaaatatagttaatatgaggattttgagcagctaatgttgtaataaactgccccatacccgaaccaatttcaatgtgtatcggttgcgttttatcaaaccattcagtcattttccctgcatgttggccgtccatgtcaaccaattcaggatgatcttttaaataatcttcagcccatggtttgtatcgaactctcatattttattctcctcttaaataaacatgttactattcataacttcatttaggaatttaagccaagtgttcatatccttatatcttttttgctcttcataccattgaacaagacctatagattgaattaccgtataccatttcatacgtttatttaaattcaagctctcttgaactccatatgtctcaagccattcagaccattgttgttgtggaacatagttgtaaagcagcattccgatatcaattgccgggtctgcaatcattgcaccttcccaatcgactaaaaatagttcatctcgatcggataataaccaattattatgattcacatcaccatgtacaacagtgaaaaaacgcgaatctaaactcggtatatgctcttctaaataggttaatgattttctcacaatatgatgtgttaaaacttctcttgataaagaggcattaattttattaagcataatctcaggagtaataggttccatttccatacgctttaacatacttaataaaggtctagaattgtgtatcttctttaataaatgtgcaactcttgtttgcttcatttcgtttgaagatagttcacgtccatttttccaatgttgtgctgtaacaacctcgcctgtttctatgcgtttcgtccatactaatttgggcacaataccttctgctgataatgccgcaataaatggatttgaatttcgttttaaaaacaacttttgtccatcttgttcagccatatatgcttcaccagatgcaccacctgcagaatcaagtgtccaccctaattgataaaactgctccaactcgtccacctcactttcaattagaaaatggctctagaaataggtttttcaagagccatatattctaatttataacaccatactggtacaaattttatgtccagataattattttaaatcctcaaccaatgtctacattacacgactaaatttaaatcgtaatgtctgtcattgacaccatacattctatagtcacttacttgacataaaatgtttccgtgtctaaaactacatgtttttgtaacttttgtaggcgataaactctagttttcaaaataattgctatcccattttcatggttagcataaatttataaactgtaacatttacgtacttagtaaaatatgatgcacatcatatttgtaactcatagaaaattttataatttttatcattatatttcaactgaaaatgagaaacaaaatggcactttttactaatatgtgttttctaaacaacacttttaagcttcgttttaaattataacataattcacttacgaaagttgataaatttaagtaatttaatctaaaaatatgatgaaagaattttaaatactgtgtgactctatatacttttcaaatccttcttgtagttgacgtgtaattgggccaactttaccatcattaactggttcaccatctaatttaataacaggtgtaacctcagctgaagtacttgaaacaataacttcatctgcgtttctcaagaaatctacagtaaacgtttcttctttaaatgggatgttatagtcttcggcaatttttttaattacaattcgtgtaataccattaagaatatagttgttaatcggatgtgtataaatcacaccgtctttaattgcataagcattacttgaagatccttcagtgacagtttcgcctcgatgttggattgcttcaactgcattatatttcacagcatattcttttgctaatacatttcctaataagttcaagcttttaatgtcgcaacgtaaccatcggatatcttcaacggtaacaccattcacaccattttctaaatgatcataaggacgatcataactctttgtataagcaacaattgctggttctacttcaggtgtcgggaagctatgatttctttcagctacaccacgcgttgcttgaatataaattgccccagtttcaatttgattcatatcaactaatttacgagatagttcaattaattcttctacagaataatttaaatctaaaccaatctcattggcactacgtaaaaatctttcataatgttccgttactgtaaataacttaccattatatacgcgaatgtattcataaataccatcgccaaatacgtatcctctgtcgttgtatgaaacctttgcttcacttggacttacaaactcaccatttaaaaaaattttttccatatattattcctccacacataatgaataaattgcttctaaataaatactagttgcattaaataactgttttttagtgatatattcattcttctgatgcattaaatcttcagaatcactaaacattgcgccaaatgctacacccttgtctaagtttctcgcataagtaccgccacctatagtataaggttcagtcatatcatttgtttgatttctatatgcagtaactaacttttgtacaaaaggatcatttttatcaacataatgtggtggttggactttacctaatttcacttcaaagccatattgttgaatctcatttgcaaaacgatccatagctttttcaaattcaaatccttctgggtagcgcaagttgataccgaaaagacccgcattttcattatcatatgtaataacaccaatgttagttgtcacatcacccatgacatctgtatggaatttcattcccatcttttcaccaaaatctgaattaaataagtagcgattactaaatgctacaaacgcttgtgcattattatcaagatttaatgatgctaagaattttagtaagtaaagacccgcattcacaccgatagatggatccataccatgaaccgctttaccttcaactgttaaaactagaatgccactatcaacagtactatcaccttgtaaatgattttgttctaaaaagtactcaaagtcttgaataacatctgtcatattttctttaacaagcactcttgcttctgcatgatcaggtaccatgttgtaacgttcaccagatttaaaagttattaattcataatcaggttcatcttgatcttcagtaagcttattttgaactaagtcaaatgttgtaatgcctttttcaccatgaatacacggaaattctgcatctggtgcaaaacctaatgttggcatttcttctgttttaaaatagcgatcagtacatttccaatcagattcttcatccgtaccaataatcatatgaatacgtttcttccagtccacattcatatcttctaatatcttaattgcataataagcagcaattgttggacctttgtcatcaagtgtacctctagctatgatagcatcttctgttacaaccggctcaaacggattactatcccatccatcaccagcaggaacaacgtcaacatgacataagatacctaatacgtcatttcctttacctgcctcaattcttcctgcaatatgatccacatcatgtgttgtaaatccatctctatgtgcaatttcatacatgtagtctaatgccttacgaggacctggaccaactggtgcgtcttctgatgcttttgcatcatctctcacactttcaattgctaataatccttttaagtcattaatgatttgatcttcgtattgttgaactttttctttccacattcgaaatcgacttccttttttctataagttaaattctattttacatgaaatgatataaaaactacaataagatgtcagaaaataataaaaaggaacaaaacgatgttatcgaattgacataaaatcaacgataaccgcttcattcctctatatttttattaaattttctctagtcttttcataaatctaataagaagttaactttttattttttatcagacaacgcgttcttattcttttttaaatcttcttctgtaactacacgcaaattattgtttggtgcagcgccgccttcatcatcaaatttcccctcttcaatactgtcttcagttttattatccaaaactgtaaatttagatttttcttcttcaaaaaatgcttttggatcgttcttcaatctagcagcataatctttagggttatttttaacttcttggattgtttcatttgcaattgttcctaattgcgtcgctttatccttagcattatctttatagctttgaggatcttgtttatatttattatattctgctttcagcttgtcacgactatctttacgtgtaacaagtacagctgctacagcgccacctatacctaaaattgctttaaataaatttccttttgccatatcaatcgtctcccttttatttataatttaatttgtgaaaatcattttctgttaataaacgataattacctgactctaaattgctatctagttctaagtcagcaatttttatacgttttaaatgtattacctcattttgaatactgtgaaacattcgtttaacttgatgatattttccttcataaattgttacgtgtgacgtttgattatcaatataagttaatattgcaggcttaaccttgccatcagacagtgttacaccctctttaaaagcttgaatgtcttcttcagtgataggatttgctgaaataacttcatattttttagaaacatgtttgtttggactcattaattcatgattaaaatcaccatcattcgttatcaataatagcccttctgtatctttatcaagacgaccaaccggaaaaatatttagatgttggtattcaggtattaaatcaataacggtttttgaatgatgatcttcagttgccgatatataaccttttggcttatttaacataatatagacattttcaacgtattctattaattctccacgaacagatatcttatcgttttttggttcaatatgtgcttttggtgatttaattacttgttcgttgacatttacaaggccttttttaagtaactgtttgacctcattacgtgtaccgacgcccatatttgctaaaaatttatctattctcatcgtaaaaacctaactctacgtcttaatttttcagggatttcacctaaaaattcatctgcaaggcgcgttttaatcgtaattgtaccgtaaattagaataccaactgttacgcctaaaatgataataattaaatatccaagttttgttggctctaagaataggttcgcaatgaagaatactgcttctacacctaacatcataataaatgagtataagaatatttttgcgaaatgaatccagctatagctaaatttaaatttcgcgtattttttaagaatatagaaattacatccaattgcaaataataatgcaatactagtacataaaatagcaccaggcgtatggaataacataattaatgggtagtttaatgctaacttgataactacagaagctaaaataacataaactgttaatttctgtttatctataccttgtaacattgacgccgttacacttaatagtgaaattagtattgctacaggcgcatagtagaataataagcgactaccatcatggttagggtcatgacctaaaacaattggatcgtaaccatagaaaactgtgaataatggttgtgccaaggccataattccaatactagctggaacagttataaacattaatacaccaatagatgttctaatttgatgatgcatttcatgtaagcgaccttctgcaaatgtttttgtaatataaggaattaaacttactgcaaatccagcacttaatgatgtcggaatcattacaattttattagttgacatatttagcatattaaagaatatatcttgtaactgtgaaggtataccaactaaagataaagcaccgttatgtgtaaattgatctactaagttaaataatggataattcaaacttacaataacgaatggaatactataagcaataatttctttatacatcttgccatatgacacatctatatctgtgtaatcagattcgaccatacgatcaatattatgcttacgctttctccagtaataccagagtgtgaatataccaataatcgcaccaactgctgctgcaaaagtagcaataccattggctaataaaatagaaccatcaaagacatttagtactaaataacttccgattaatatgaaaatcacgcgtgcaatttgctcagttacttctgacactgctgttggccccatagatttataaccttggaatatacccctccatgtcgctaatacaggtataaagataacaaccatactaatgattctaataatccatgtaatgtcatcaactgaccaaccatttttatcgtgaacatttctagctaaagttaattcagaaatatatggtgctaggaaataaagtactaagaaacctaaaacaccggtaatactcatgacaataaaactagatttataaaatttctgactgactttatatgcaccaatcgcattatacttcgctacatatttagaagcagctaatggtacacctgctgtcgcaactgcaattgcaatattatatggtgcataagcgtatgtgaacggcgccatattttcttgtccaccaattaaatagttgaatggaatgataaaaagtacgcctaacacctttgtaatcaaaatactaattgtaattaaaaaggtcccacgcaccatttctttactttcactcattacgaatctccctatctcatgtttattaaagttttgtaaactaaaagctatttctctgtaaaatcaattttcattattatgaatatatcacaaaacttaatttcattgtcgtatattcaatgaattatcataacaaaattatcaacgcattgtcattgaatactcgaatttgattaaaatattacgaaatttcatatgaaaattatactactatttgagatgaacatcgcataacagttgaaaattcattcttattataaacatacatcttcattttttatgaagttcacattataaatatattcaacataattgtcatctcatcacactagagatatagcaaagtttaaaaaagtactataaaatagcaattgaatgtccagtaacaaatttggaggaagcgtatatgtatcaaacaattattatcggaggcggacctagcggcttaatggcggcagtagctgcaagcgaacaaagtagcaatgtgttactcattgaaaaaaagaaaggtctaggtcgtaaactcaaaatatctggtggcggtagatgtaacgtaactaatcgattaccatatgctgaaattattaagaacattcctggaaatgggaaatttttatatagtcccttttcaatttttgataatgaatccatcatagatttttttgagtctaggggtgttaaattaaaagaagaagatcacgggcggatgtttccagcttccaacaaggcacaagacgtcgttgatactttagtgacaactatagaaaaacaacatgtaacagttaaggaagaagaggcagtgagtcgcatcgaagtaaaagaagatcaaacctttacagtacacactcaaattaatagttatgacagccattcgctagtaatcgcaactggtggaacaagtgtccctcaaactggttcaacaggtgatggttataaattcgctcaagatttaggtcataccatcactgaattattccctactgaggtacctattacatcagctgaacctttcatcaaatccaatcgtctaaaaggtttaagtttaaaagatgttgaattgtcagtacttaagaaaaatggtaaaaaacgcattagtcatcaaatggatatgttatttactcattttggtatcagtggtccagctgcattaagatgtagtcagtttgtttataaagaacaaaaaaatcaaaaaacacaatatgtttccatggcaattgatgcatttcctgaattaaaccatgaacaattaaaacaacacatcacctcattattatccgacacaccagataaaatcattaaaaacagcttgcatggactaattgaggaacgctacttactgttcatgttagaacaagctggcgttgatgaaaatatcactgcacaccacttatcaaatcaacaattgaacgacttagtaaatatgtttaaagggtttgtatttaaggtaaacgggacgttacctatagataaggcatttgtcacaggtggtggtgtatcacttaaagaaatccaacctaaaacaatgatgtctaaattagttcctggattatttttatgtggtgaagtattagatatacatggttatactggtggttataatattacaagcgcactcgtaacaggacatgtcgctggattatatgccggtcattacgcacatgcatcaatggaataatagtataaaatttggtttaattctctttagtagatcaactttttcattcaattaaaaatgaccttaatataactgagtcactaaaaagtgttgttatattaaggtcatttcgttaattatgattctttttcatttttagtacgtcttctagctaataatgctgcgcctgtaattagtgctaattcttttaatggtaaatccatttcttcagaaccagtatttggaagttctttttcaactttgcgcacttcttgtttatcttcttttttaataggcgtacaaacttttggagcaggttgccccacttttggtgacgcttttatcacttcagcaggtaatttaattgctaaaatttcatcaataatgaattgcgtatgttgtttgatgtcatttaatgtcgcatcttcatcgatcattctattaccatctgcaacatattgatctattaacgctttcactttagccaattgttctggtgttgcaatcgctttgaatttcgcataggtttgttgcgcaatattttcaatgcgcattaagctatgttctttttcagtaattactgcttctatatcgcctaatgcaacattaaatcgttttaaaaccgcatcaacatcagcattagtgcgtgctgtttttaattcttcatccatttgtaattttaatgcagttatagcttttaatgcatctgccttattacgatcacttacttttcgataattttgtactaaatgcgtaacacgtgcaatatcttggttgattgttttttcggcctccggttttttaacaggatgcacatctaaaccttgtattgtttgaagattaaatgatgctgttttatccacttgtgcattgctacggtcatgatcaagttgtccgattgctgcgtcataaatattttgtaactgtgctaaaacactatttctttcttctaccgttgcttgaacattcgcttcaattgcttgttttttatcattgagcaatgttgtcaattgttctcgagcagacgcctttctgttaataacaggttcgatttcacgaatttcgtttttcccatcatgcaataaatatgccacatcagcattagtcactgcactagcaatgtgttgtttcgcttttattaatgcttgttctacttgtgctattgcagcattttgttcttcatctgtcgcttcattatttgatttgattaaattaattttatgagtagcgatattttgaatttgttgtaacgctgttgttttaactgttgttgctggtttaatttttgaaataatattttgagcatcgatactattttgattaacttgcgcagtcttatctgcatgattgatctgatcaatagcctgattaagtgcttgttctactaaatgtttagcagctaatctttcttcttcggtagataaatcactttgatcaataagtgcattttgagcttcagcttttgcgctgacagattgacgcgctgctggtttaacttgaactttaggtaaaatcactttgatgttgttgttaccatcagcctcagtttgatccacttctgcattcgttttgttttgtgcaatatcatttttaattgcattaacaattttatttaacgcagcaatagcaacatttcgttcatcttgcgttgtatctagcgtatttcgtattgcagcgagttgattattattactttcatcaatgttatccaacgctgcacgtttgcgtctaactttcggtttaatttgttcgattgccttaatcgtttgatttctaacatcattgacagctgcatcttgtgtcgtattgtctatattttgttgaccttgtttaagtgtgtcgttaatttgttggtttgcttcatctaattcatcagtcgtagcatgtggtgtatcttttatagattctacttggttatctgcgctcgcttttatggcttcttgagcttcaggtttaaccacaatgtgcggttctacgccttttaacgtagcaataccatttgattcaacacgtttcacatcattattcgctattgcttgatcgatgttttgtaatgcacgtttttcattattcgctaattgatttaaagcaacttgtttttcttcatcagtcgcatgttccgcttgctcaatttcgtgctttttaacctcatattgttgctttactgcatctctagcagttgctctaacaatatggtcaggcgtcactaatgcaatgtcgtcaagcgcttgatttgttgagtcattaacttgctgatttgttctatcatttgtgatatttgtcatagctttagcaactaaatcattgattttatctaacgccgcttgtctttcttctgctgtcgcttctttatcttgattaatttgcgcacgtaattcattcgctttttgattgattttttcacgtgctgctggtttaacttttgtttcaggttgaatcatttttatcgcagttataccatctgttgctgcttgattcacctgactattcgtttgagcttggtcaatagctgcaagtgctttttctttttctttatctaatgcttgtaaagcaacttctttctcattatctgttgaatcaagactattatcaatttgctgttgcttttctttaacagctttttcaatatctgcaattgcctttggtttaattactacttcagcttcaacattatctatagcattaatcgcttgatttgtagttgcgtctacctgatcatttgtttggttttgattaatttgattaaatgcttgatctttaagttgattgatttgattaactgcagcctgcttttcttcgtcagttgcattaggtgtttgtttaaccgcttcaatacgcttcgccacttcagcagtgattttatctcgcgctgcttgtttttttactacgtcaacttgaacagcatcgatattattctctgccactgtcgcagcttggtctacttctgcatttgtattagctagtttaatactttcaatagcttgttgtctgtcttgatttaaaatgttgattgcagcattcttctcatcatctgttgcatctggtgtagcattgatttcagctaatttagcattataatgctgattgatttgtgctaatactgcaggttttttaacaatatttggctgaatcgcattcattgcttgtttacctgcttgtaatgcttgatctacttctgcatttgtatcagcttgatttatattattaattgccgttgctaaatcttgatctacttgatttaatgctacttgcttttcttcatcagttgcatttgtgttttgattaatttcttgctttttagcagttgctaagtccgttaatacacctgtggctgattgtttcttcgttacatgcggttgaactgtaccgatttgattgactgcatcgtctctaatactattgaccatcgcagtagtagacgtcacaccaatatcagttaatgctctatttttaagtgtattgacacgatctattgcttcttgtttctcttctcgagtcgcgccaggtgtagcattgatatttgatatcgcctcacgtgctttttcatttacagtattacgagcatccgttttaacttgtgtcgccggttgaatcgcaagtatattttgtgtgccctgatcttttgcttgtgcaacttcttgattcgtatctgctgcattaatattttgcttcgctgtggctacagcttgatcaagcaattgttgtgctgcttgttgctcttctaaggtcgcatcattattattaaatatcgcattatgttgcgtttctgcactttgatcaatagcgtttttagcatctgttttaacctttgtagctggctcaatggcctgtattccttgaatcgcatttgtcttcacttgctcaacatcagcattgctattagcatttaaaatattagtattcgcagcagctacagcagcatttactttctcaattgctgcttgtctttcttcttgagttgcatcaggattagcattgatctctgcgatatgctgttgtgcatcatgtgatacggcatctcttgcagcttgcttaacaacagttacaggagcaattggattaatgacatttagaccatcacctttggcagtatctacatcatcattggttgtcgcttgattgatttgttctaatgcgtggtttgtggcttgcgttaattcattcaatgctgcatttttctcttcttgtgttgcttctctattgctatttatttgttgtcgtttcgttgctgtcgcttggttaattgcatctcttgctgcttgtttgtgtgtcacttgtggcacaactgcaccaattgtattaataccattatttttagctgtttcaacatcagcattggtagtagcattcgtaacattatcaatagcatctgtttcatccgttgttaattgatttaatgcatcttgaatttcgtcttgagtagcatctggtgtgttattgataatttctctttgtttcgctgctttatcacgtatagcttgtttagcatttggtttaacaaccggtgttgcagtatcaccacttaaggtctgtataccttgatccttaattctagtaacgccatcatcagtcgtttggtcaccaatattcccaataatttcatttttatgttcctcgataacttgaatcgctgcttgtttttcttcatctgtcagttcatcattttggttaactaaatcttccatgtcatcaacttttctattaacggcattttcagcgtcaacactacgaattaacgtatgttgcatctgatttgctaatgaatcgatatctgcttgagaaactcttttgtttaaaggtacattgttacggttttcatctaaaattgtttgtgcgcgtcttttaagatcattaaaaatatctaatgatgcaaatgtataatccgcctgttgaattcgtctatcgacttcagcttgtaatgcgtctttattcatgatgatatcaattgtatatggatttgtacttacagtatgactttcagcaggtgaattaataaaatcttgtgaaaatgttttatacgttaatgtatcgttaaatgttactgttcttggtgttggcacattgttcacacgtagcttatacttcaaatccaatattttatcaggcataagtcgtgccggtgaattccctgaacctccaccagtacttttaattgttatcacacgatttgttgcgtcatacgtcacattcatatcattcatatcattcatatcaacacctgaattaccgctaggaaaatctttagtcaatgaattattaacatattctaccccttcaggtaattgtattttatacacaaaatcatctgtattaaatgaagcaccgaagttaccattattctttaatgacgttgttacagtaaactctttattattcgttgctgttggctccattattcgtctttcaacataaagatgcgaaccagaatgtagaccgattgagtctacaaagtcataatatttatatccatctcgtaattgataaataccacgtacatctgttattgcgtcatttttaggagaaaattgtatttttaaatgactaacattttctggtactttaaataaacgccaaatcggaccataagcgactactttctcacctaaaatcgcatcattatcagcatttttaataactaaatttgtcataccttgatagtttttagtagtcatagtattaaattcaaagattaattcagaattcggatttactgttaatgttttctcaataccattaaaatcgccatggtcattcgtatcatttcctttaatacgacctaacgcaattacattgccttgcgcttgatagttcttagcatctcctgaatcaaacatgctcgttcttaccattgcatgactaaacacccctactttaccaccattaatcagtgtgtagcctggtaaattatcaacaacggttactgtaggcacagaccggttcgtacttggtctaatgttgttatcatcaaatgaaagcacttcgttaggtgcattttgtcctatattattggcattgggatctgttgttggcgtgtaaggcgctgtaattgcaactggtgcaccaccgtttcctgccgctgggtctgctggtgttgcattaggatctgctggcgcggcacgtctacttctttttttcggtctattagatgcttcttcagcaatcgcaactaactctggcttatctgaagaatgacggacatcttcttgaatttcttttaatgttaaatgacgctctgaatcgttgtcatttatattattaggtacgtttaatgtactattattcgccgctaaatgatgatttgtattcgacgctgtctccgtaactgttgcatgtgcatcagagtgattattgtttagctcagacaacgaattaggctgcactggcgttggcgcgacttgatttgccacaccaacgttttgatgattagtcaatgcttgatttgttgatgtattgtctgttgcatctgcattaggtgtattttgcgaaccattaactatgtttcgattagtatcggcatttgtattttgtgagttgccaggtaatgcttgatttgaaccaccttggacattatgatccgtagttaaagcttgtgcaccatttgggtttgaaagtaataaaactgtcccgattaaagtagagaatatccctactttatattttctaatactatatttatttttctttaacaaattcatttcgatttcctcctggttgtctgttctctgctgtgttgtttagaattatgctagaaatataagttctcccgattgtgtttatagccatattattttgcacaatattttaagttcactcaattttatcatcatcattttataaaataaagttttattttattacaatttagtttccgttttgtaattaatcacttaaaaaatcataacaagaacgctttagattgttttgtaacagaaagcaattcataccaaaaaacaccaagcaaccgaaacgttacttggtgtcattacaaatgtaatattattttaaattatgtcactactttaaatactttttatttccaaaccttcatcgccccaagcgtgcatgccgccttcgacatttacggcatcaatgccatttgcctctaaatattctacaactttagcgcttcgaactccaccagcacatacaatatagtatgtctcttttttgttaaatgcatttaaattgtctggaatcgtatccattggaattaactttgcattaggtatatatcccattgctgtttcttcgtcagtacgaacatcaacaatttgaactggtttagattctaaaagtttgttttttaattcatctgtagtaattgacttcattttaaagtcctccttaaaacattatttagctacaatattgactaatttttgaggaacagcgatgactttcatgatgtctttaccttcaatactcgctttaacattgtcattagataaggcaatttcttgcatttcttcttttgatgtatctttagcaattttaattttagctcttaatttaccattcacttgaacaacgatttctacttcatcatctacaagtagtgcttcgtcataagttggccaaggttggtacgtaatagactcttcatgtcctaattttgaccataattcttcaccgatatgtggtgcaataggtgctaacattttaacaaagccttcaatatacggtttataaacttcatcaactttataacactcattaataaataccattaattgactaatagcagtattaaatcctaatgtttcaaagtcttctgttacctttttaacagtttggttataaactttatctaaagatttattatttgatgttacaatttttgaacttaatgtaccatcttcatttaccattaaacgccatacacgatctaagaatcgacgagacccatctaatcctttttcactccatgcaattgcagcatctaaaggtcccataaacatttcgtaaagacgtaaagtatctgcaccatgagactgtactatttcatcaggattgattacatttcctttagatttactcatcttctcattaccttctcctaaaatcataccttggttaaataatttttggaaaggctctttcgtaggtacgatacctaaatcataaagtactttatgccaaaatcttgcatacaataagtgaagaactgcatgttctacgccaccgatatataaatcaacaggtaaccaatgttttaatttttcaggatctgctaacatattttcatttttaggatcgatgtaacgtaaataataccaacaactacctgcccattgtggcatcgtatttgtttcacgacgtcctttcatacctgttttttcatctacaacatttacaaatgaatcaatattagctagtggagactcaccagtccctgatggcttgatttcatctgtttcaggtaacaatagtggtagctcttcttcaggaacagttgtcattgttccatcttcccaatgaatgacaggaattggttctccccaataacgctgacgactgaataaccaatctcttaatttgtaattaactttcttttcgccagcacctttttgctctaataattgaatagctttagtaattgccgcttcattttctaaaccattaagttcacctgaattaatatgtttaccttcaccagtgtatgccgcttcttcaacatttccaccttcaatgacttcaatgattggcaaatcaaactttttagcaaattcatagtctctgtcatcatgagctggaactgccattattgcccctgtgccgtaagtagataatacataatcagcaatccaaatttgtactttttcaccagataaaggattaattgcatatgcaccagtgaatacacctgatttatcttttgctaaatctgtacgttctaaatcagactttttagaagcttctgtttgatacgctttcacttgatctttatattcatcagttgtaattgaatcaactaatgcatgctcaggacttaagactaagaatgatgcaccatagattgtatctggtctagtcgtaaatacttctacttttccttccgcattatctacatcaaatgaaactttggccccttcagaacgtccaatccaattacgctgcatatcttttaaagactcaggccaatctaaatcatctaaatctgctaataattgatctgcatattctgtaattttgagtacccattgtttcattggtttacgataaactgggtgaccgccacgttcagagacaccgtcaatcacttcttcgttagataagacagtacctaatgcaggacaccagttaactgcaacttcgtcaacgtatgctaaacctttgttatataactgtatgaaaatccactgtgtccatttatagtattctggatctgttgtattaacttcacgatcccaatcataactgaaccctaattctttaatttgtcgtttaaaagtttggatatttttctttgtaaattcacgtgggtcgttaccagtgtctaaagcatattgctctgctggtaatccgaatgcatcccaccccatcggatgtaacacattatatccttgcattctcttatatcttgaaatgatatctgttgctgtatagccctcaggatgtccaacatgtaaaccagcacctgatgggtatggaaacatgtctaacgcataaaatttcttttgacctaagttatcatttgttttaaatgttttattttcgtcccaatagtcttgccatttcttttcaatttgattgtggttgtaattcaacacatttcctcctattcaataaaaaaagacacctctaactattctatttacatagggacgacatttgccgcgttaccaccctatttcacaaaaattgtgcactcattttaatagtaagagatgtcattcattcaatttaaaattaatacgatttacatttagtccttaacactagctctcagcatcactagctttctgtagaaaagctccaaacgaaattaaattatacaaattaatattatgttataacgacatttatttcaagtctataacgttaattctatttactcattatgcatctatttttttaggttgcgtattattctccttgaaaaccattaataatattaatgcaaatacaagtagtaccatcataccgataaacatcatgcgcatattaaatgcatcaactaatacaccaccaagaaatggaccgaatgcttttcctactgtagcagctgaattcacaaaaccttggtactgtccttgcttaccatctggcgctaactgattggctatagttggaactgcaggccatacaaacatttctccaaaagttaaaataatcataccgacaacaaatattgtaaagttttcggcaaaactcgtgacaaagaacgacaacataaaaatgatgatgccgacaaacatttgcttctttaagtttccttttaacagatagagaatcggtttaattaatggttgtgctactaaaatcattattccgttaattgtccataaaacactatattgtgccattgaaatattaatcgattgtgtaaatgatgcgattgtagactcccattgaatatacgcaacccaacaaattgcaaacattgcacaaattagtactaatgaaataaatcttgctttattctttttaccagtaatatctaaatgagttggatatttaactttcgcattaatttcaatattaaattgcgttaccgcgacaagtgcaaacacaacatacataataagattggctaaaaagatatagttaaagctaaattctgcgacaaagccgcccattgcagcgccgacagcaacaccaatattttgcgctaagtatatcgcattaaacgtttgtctaccgccattcggccacactgctccagccattgcgtatatcgcaggaataatcattccgccaccaaagcctaacattacaagccatacagcataccaaggccacccgtgaaagaaattaagtagcgttgtactacaaagacaagtgaaagttccaattaaaatcgtcttgtatccacctaatttatcaaatagtgaaccacctaataagtttccaataaccatgccaaatgaatttatcattagcactaaaccagcaacagttaaactttttccaagttcttgtttcatataaattgtatttaaaggccacaaaaaactggaaccagtaatatttaacgccatgccaattactagccaccagactgatttaggtatattcatatttcatagttcctctctcttttttgtcaaactataataaacactataacattaaaatatgttaaaatctgtacttagaactctttttttatagaaaggaaaatgacttatgggcaatcatttccaatacgcttttgaaaacaaacgttatcacacatggaattaccatttaaaaaataaatttggacaaaaaatatttaaagttgcattggatggcgggtttgactgtcctaaccgcgatggcactgtagcacatggtggatgtacattttgttctgctgcaggtagcggagactttgcaggtaatcgtgcagattcaatcgcagtacaatttaaagaaattaaggaaaagatgcatgagaaatggcacgaaggtaaatatatagcttattttcaagcatttacaaatacacatgcaccagttgaagtgttaaaagaaaaattcgaacctgtacttaaagaaccgggtgttgtgggattatctattggtacgcgtcctgactgtctaccagatgatgttgttgaatatttggcggaattgaatcaacgaacatacttatgggttgaattaggactacaaacaatccatcaatcaacatctgatttaatcaatcgtgcccatgatatgaaaacttattatgatggtgtggcaaaattacgtaaacacaatatcaatgtatgtacacacatcattaatggcttacctggcgaagactatgacatgatgatggctactgccaaagaagttgcacaaatggatgtacaaggtattaaaattcatttacttcatttgttaaaaggtacaccgatggtaaaacaatacgataaaggtttattaacttttatgactcaagaagaatacacaaacctagttgtggaccaattagaagtgattccccctgaaatgatcgttcatcgaattaccggtgatggtccaatagatatcatggtcggtccaatgtggagtgttaataaatgggaagtattaaatggcatcgatgctgaattagcacgtagaaattcttatcaaggcttgcgttacaagtctaaggtgaagcaatgaaattagaacgtatactccctttttcaaaaacactcattaaacaacatataacaccagaaagtattgttgtagacgcaacttgcggtaacggcaatgacactttatttttagccgaacaagtaccagaaggacatgtttatggtttcgacattcaagatttagctttggaaaatacacgtgataaagttaaggatttcaatcatgtttctttaataaaagatggacatgaaaatattgaacatcatataaatgatgcacataaaggtcatattgatgcagccatctttaacctaggttatttgcctaaaggtgataaatctattgtgacaaagcctgacacgacaatccaagctattaattcattgctatcattaatgtcaattgaaggtattattgtacttgttatatatcatggtcataacgaaggacaaattgagaagcatgcattgcttgattatttgagtactttggatcaaaagcatgcgcaagttttgaaatatcaatttttaaaccaacgtaatcatgctccattcatttgtgccatagaaaaaatttcttaagcatttgctgcgctatactatttataatttaggattgagtagtcaacatttgaaaaaatatcaacgacaaaaagaggttttcaacttaatgaaaacctctttttatgctattaaacttacacagcaataattgcgtttaaactattttgcattgctgttgctctacttgcaatcgcatcactgatgaaattcaacaactctactttctcttgttgtaacttttcattgaaatgaataataactgttctttcatcgtcaacaggacgctctttgtaaatccattctaattcaactaaattattatacgttctagtacgcttatacggtttgacttcaacaaatctgtccatttctttaagcgtcatagaacctttttgccataaagttagtaaaattaaaatttcttctctagacattttgtactcgctttcaatctcgctaaaaattgagttaatgtcacccaaaagtgtttctaattgcaaaatcccaaatacagtatcgttatttacttttttcatgctaaacatctcccgattaatgatcacatatttagacaccacacaagtattaacaaacatcccaacaatcccaaaacttgtatgtgctaacttatgcttaaaactacaagtgtaaataaacttgctttctattcacttgtcaaagttgaataaaattaaataagtataaaaaccaataatcaacagagttaatatttagaaataagattatagtacataaaacaaatcactctattacatattaattttataatttatatacaaagaaaatatatcaatattaccattaaattgcaacaattctacatatatttcttcaaaaaagatacacattgaatttttattacatataactctcatgaaaattgattaaactaaattaattagttagccttaaatttaacaaattaaatcaaaccgaatgaggctaaattggttatttttcaagatatgatttgtataaatcaaaacatttcttacaaatcaaatgtgtataaaatttgatatacattctcaaccttaaaaaagttaaaaaaagatgagcatctactgtctcatctttttagaatattaaatttctacaatttcgtcatcttcaacaataaagcccattgtattgacgctgttatttaagaaagtcagaatataacgcattacttcatcgcgttctggctcgttgtgaacctcgtgataaaaaccttgccaagctttaaaatataattcaggtgtttgatatttttctttaaactcatcaattgccctagtatcaacaattaaatccttcgttccatacattaatagtgttggcattggttgaatgtcatgaatatgagccatcgtatctttcatcgtctcattaattgtgttataccaatgatacgttgctttttttaacattaaaccatcgttaactgtttcttcaacaatttctaaattacgtgttaaatcttttggttctacaccaacattaaaacgtgtgtcttttgaaattttacctatatttgaaacaagtttatctttacgattttttccatttttttgaagttctagcataggagaaattaacatcatcccctcgattggcaattctactttttcaagtaaatttaataaaatcaaaccgccaagtcctacccctaatacataagtaggaattttatattcattagctatctttaaccagtctagcaaactttcgtgatacgtttgaaagttttcaatttgtcctttattagctcttgaagtttgaccttgaccaggcaaatctcccataatcacatgatagccatttcttcttaacatcgtaataacatatgcatatcttcccgtatgttctaatatattatgagcaataacaacgacgcctttcgcatcattttcagcttcccacttccacattattatactgcccctttttcattaatcttcaataacataattatagcaaattcactatgtagatttctatttatagtattattgttgtccatattattatatacaaatgaaatcaacatcaataatagtgtaattatacataattatttttgattgttttttatgaaaacgctttctcgaatatttttttcatgctaaacttattgtaaacacaagggtttggaggagtagcaatggcactattaaagaatttttttatcggattatctaataatagttttttaaacaacgcagcaaaaaaagtgggcccacgtttgggtgccaataaagtcgttgccggaaatacaattccagagttaattaatacaatcgaatacttaaatgacaagaatatcgctgttacggtagacaatttaggggaatttgtcggtacagttgaagaaagtaatcatgctaaagaacaaattttaacaattatggacgcgcttcatcaacatggcgtaaaggcacatatgtctgttaaattgagtcagttaggtgcagaattcgacttagaattagcttaccaaaatttaagagagattttacttaaagcaaatacttacaacaatatgcatataaatattgatactgaaaaatacgctagcctgcaacaaattgttcaagttttagatcgattaaaaggcgaatttagaaatgttggtactgtaattcaagcatatttatacgatagccatgaattagttgataagtaccaagatttacgattacgtttggttaaaggtgcgtataaagaaaacgaatcaattgcatttcaatctaaggaagacgtagatgcaaattacatcaagataattgaacaacgtttgttaaacgcacgcaatttcacttcaattgcaacacatgaccatcgcatcattaatcatgtaaaacaatttatgaaagaaaatcacattgaaaaagatcgtatggaattccaaatgctctatggttttagatcagagttagcagaagaaattgcaaatgaaggctataatttcactatttatgtaccttatggcgatgattggtttgcgtattttatgagaagattagcagaacgcccacaaaacctttctcttgctgtaaaagaatttgtgaaacctgctggattaaaacgtgttggcataattgcagctttaggagctacagttatgttaggtttaagtacaattaaaaaattatgccgtaaatagagcttggcataaacaataatttaggagtctggaacattaatcaatgttctaggctcctaaatgttatattggcagttctgaatcatttataaatctttgattatgaactcacaacagcgctctatgcttttatagattttaataaattagccatttcaattgcacttactgctgcttcggcacctttattgccggctttcgtacccgctctttcaacagcttgttcaatactttcagtcgttaaaataccaaatatgactggtacattagtttgatcatttactttagaaacacctttcgcgacttcattacaaacataatcataatgagacgtagcaccgcgaattacgcatcctaatgtaattactgcatcataatttcctgatgaggctaattttttagctactaaaggaatttcaaacgcacccggaacaaatgctacatcaatattgtcttcattaacatcatgtcgaatcaaagtatcttttgcaccttcaagtaatcttccagtgataaaatcattaaatcgactaactacgattgcaactttcaaatcttttccaattaatttaccttcaaaattcatgttaaagtcctcctatattaaatgacccatttttatttttttcgtttccatataatcatgattatgtaccgtttctggtacgataacttcaattctttctgcaatatcaatgccatattgttttaatccttcaaatttacttggattattacttaataaattgatatgttcgatgttaaaatattttaaaatctgtgcagcaatatgataatctcgcaaatcttcatcaaaacctaatgctaaatttgcagttactgtatcatatccttgctcaattaattcatatgcgcgtaatttgtttaacaatcctatgccacgaccttcttgaggtagataaataatcatgccaccatgttcattgatatacttcatagacgattcaagttgagcaccacaatcacaacgttgactatggaaaatatcgcctgtaaggcacgcagaatgtaagcgtacattttcatgttgtcgaattgcaccttttgtcagtacaactatctcttcatctgtataagtcgctttaaaaccatacatatcaaatgttccgaaatctgtaggcattttcacttttgccttaaattcaatttctggttctaattttttacgatattcaattaaatcatcaatcgtaattatctttaattgatgtttttctttaaacttttgtaaatcttgtcctttcgccatcgtgccgtcatcattcataatctcacaaatgacaccagcgggcttggcaccagtaagtttagctaaatcaacagccgcttctgtgtgtccatttctagctaatacgcctttatcttgtgctactaatggaaataaatgaccaggacgattaaaatctttagcttcactactaagatcaatgagctttttggcagtcaatgtacgttcataagcgctaattcctgttgttgtatctacatgatcaatactcactgtaaattgcgtaccaaagatgtctgagttatcatcaaccatttgtaccaaatccaaacgttgtgcaatatctttagacactggtgcgcatattaatccccttgcttctttcgccataaaattaatggtattatcgttcatccattcagtgaccgctactaaatcaccttcattttcacgattctcatcatctactacaataattgtttctccattttttaaagccattaaagcactgtcaatattatcgaattgcatgctacccctcctaaaaaccaaatgctcttaatttatctacagataatgggtctttatctttatttaaaatattttcaacatatttaaacaaaacgtctgtttctagatgtactttatctcctaattttttggatgataaaatcgttgaacgcctcgtttctggaataagatgaatgtcaaaactgttatcatgtttctcaaataccgttagacttacaccatccacagtgatagacccttgtttcactaactgcttattaatatgttggctacattgaatagtaataattttggcattggctgtttcatttatttttgaaactgttcctagttcatctacatgaccgaggacaaaatgtccaccaaacctaccgttaccactcatggcacgctctaaatttacttctgattgtcgcttaacatctgctaaataggttttattttcagtgcctttaattacttgtacagtaaaagatgtctgattaaaatcaatcactgttaaacatgcaccattaacactgatggaatcaccaatatgcatatctgccgtaattttatgtgcttcaatttcaatcgtcctgactgatttacgaatttgaacacttttaacaacacctatttcttcaacgatgccagtaaacatgcatcatcacttctttcgtaaagttaatttgacattttgatttaataactcggaatgaacaatttcaaattggttcgcatctggtatctcaatcacatcatttgtttgataaaattgataatttccagatccgccaattaatttcggggcataatagagaataaattcatctatataattagattggagaaattctgaagtagtggttggacctgcctcgactagcaaagttccaactcctcttttatataaattgtgaagaattgttgttaaatcacaagacttcaagtaaataatttcaatatgtgtttgattggttgttaaatttggattttcagtatatatccaaattggtgttgattcatcttgataaatttgctgattaaaatgaatattcccagacttagacaatattacttttataggattttttccatcttgaatacgtgtagtatattgtggatcatctaactcaactgtacgtcttccagttaacactgcgtcgtgtcgatgtcttaacttatagacatcttgtttaacctctttgttagtaatccattgactttgtccattatcattcgcttgtttaccatctaaacttgcagatactttcactgtaatttgtggcagttgctttgcttttgctttaaaaaagtcttggtataattgtgatgcacgttcatcatcaacgcattcaacctcaataccgtgatcccgtaacgtctcatcaccatgtgtatttaacgaattgtcttttgttgcgtaaactactttagctatcttacaatcaataattttgttaacacagggtggtgttgaaccaaaatgactacatggctctaacgtaatataaatcgtcgcaccttcagcattttgttgtgccatatcaagtgcttgaacctccgcatgcttgtcaccttttctcaagtgtgcaccaataccaacaatcctaccttctttaactacaacagcgccaacgggtggattaacacctgtttgaccttgtaccatatttgcaagttgaatcgcataatccataaattgactcaaacgatcacctctataaacaaaaatcctcacatcatgaattaagatgcaaggagaaaaatttatcgttaaataagcctatttgtacacattttttacaaatacgctacattatctttgtcgataattaacattctttctcccatccagactttaactgtcggctctagaatctcactagatcagccactaatatgaaacatattagcaggtcgcaggctttatttactgccggttgggaatttcaccctgccccgaaagaattatatatgaaattgttatagattatttgagtacgtagtatgtcaactacatttaaaatgatactatatgttttctgaaaaaacaattaatgacggttttaatttaatataatttgagtactataggcatctcattgatatgattcttactaacagacattaaaatcaaaccttcaattcgtctctatagagcgttctctttattatcttctagttacaaattattgattgtcactgcgctgttgttgctcattcgattctaaagcatcatataattgagatactgtatgcgcaacttgttctactatcattttcacaccatttcgtagtttattaacaccgtttgtcatttgacctatcgcaatcatatttgttaatgttccaaaccttggactaataacttgattggtttccggtatgatttgtatgcctcccattggatgtgcttgtacaatttgtctattttcaagatttttaattaattgatcatcttgatctaattcatttaaatgactttttgcacctgtcgcgttaatgacaacattatatatgtctactgattcttggtttttgtatgaaaaataatacaacttgccatcatgtttcacatcttctaaatcttttttcaaaattaaagacttattttctattaattcaataattagttcagcagttcttggaggcattggatttgaatttaattgaatcatttttgagtatttttgattaaattgatgttggtcttcaatacttaagctattccatatccaatttaaattctctttcaaatgttcaatcatactttggaaaatgcccatttctgttggacgcgctaaatcatacttcaaatctgcaatatgatttcctgtacgtctatgtactaattttttaaaatcaatgtcatattcagcacattcttttaaaaataaagaaactaaagtatcaagcggtgcattgccgaaatgatgttttttaatgtcatttaatttgtctttagttaagtacttgaatgacacgtcaatcattgtacctcttacacttggtaaatttgcagaacgactcgtcatagtaattggtaatttcggatgatgagcagcaacataacgaacaacatctaaactggcaaggcctgtaccaataatcgcaatatcgtcctgttcatttacttcgtctaacgtattatatgttggataaggcgtagcgatatatccttttttaccctttaagttatatggatcatggtaggcaaatgtaccacatgttaaaaatacataatcgtacgcttgccatgattgttctgaatttgtagtacatatgtaataagttaaattcgtttcatcaatattagaatttgtataaatctcttgaactttattataaatagttgatatatttggatattttttcgtgaacatagataaataagatttcatataatgtccgaatacaaatctcggtaaatatgcaggttcatcaaaattaaaatcagtttgctgtttataccacttccaaaattcagtctcatcatttaaatttaaactcatctttttcgaaggcatattaattagcagctcagaactatcattttgaaatggtacgccctgtcccatatttactttatcatcgtataaatctatatctaattgattaaattttgggtgcttaactaactctctcaatacacttacaccagcagttcccatgcctattattgctacacgcatatatcatccatccttttgtaattcaaaatattatatttatactattacctataattatagcaatttggtatttttaataaaatttattaaggtaagctattatttcacttttacaaccactaaaccatttaaaacttttcatttaatatcaaatctagtgtttgtgttaaaatatttttaacaatttgccatattttatgaattcaccattgtcatacttcattacttcatcataattatgattcgttttaaagatgttcattcaatatcgacaacagcttatgtgttaaaatatttttaacgaggtgaattaaattgaaatttatagcaaagatattaatctcattagtaattctatttatgatttttagtcgtaaaaataaagcttcttaatcaatacccttgattacaaaataaattcaactaaggtgattgaccatacactcaatatatggctaatcacctttttcaatgcaaaacaaattgtatatcttgcaaaatcaatatctataatttatctttaatacccttttaatacttaaaccaaatttagattacatagtcatatcgtgtaatataccaaagaaacatagacattcatctatatagatgataatctatttaacgtctaggaggtatgttatgacgtataaagaactagcaacatttttaaaagttttatccgatccaagcagattagaaatactagatttactttcttgtggagagttatgcgcttgtgatttgttagaacattttcaattctctcaacctacacttagctatcatatgaaagcattagtaaaaaccaactttgttacgacacgaaaaatcggaaatacacatttataccaacttaatcataatatttttgagtccgtaattaataacttgtctaaggttcatacctctaaccaacgatgtatttgtcataaccttaagactggtgaatgctaatgatgacaactttagcgacactcatttttctagtaactttattatttgtattatggcaacctaaaggcctagatattggcattaccgcattaactggtgcctttattgctgttattactggtgttgtaagtttttccgatgttttcgaagtaacaggtatagtctggaatgccactttaacttttgtctcagtcatacttatttcattaatattagataaaattggattttttgaatggtcagcgatccatatgttacatgcttcaaaaggtagtggcctaaaaatgttcgtttatatcatattattgggtgccgtggttgctgcatttttcgcaaatgatggcgcagctttaatcttaacgcccattgtattagcaatggtaaaaaatataggttttagtaagcgggccatatttccatttattattgcgagtggttttattgctgatacaacgtctttacctttaatcgtgagcaatttggtcaatatcatttctgcagattactttaacattagtttctctcaatatcttagtagaatgattatccctaatttattctcgttattagctagccttctagttttgtggttatattttagaaaagcgattcctaaaacttttgaagataataaaataaagcgtcctatagatgccattaatgatttaaagctatttaaaatttcatggattgttctagttatattacttttcggctatctaatcagtgaatttactaaaattccggtatcaattttcaccggaatcattgcttttatatttctaatattggctcgtaaatcaaatgctgtaaatattaagcaagtcattaagggcgcaccttggaatatagtattattttcaattggtatgtatatcgtcgtattcggcttaagaaatgctggcattactttaatattggctaaaatattagaatatatttccaattacggtctatttagcaccattttgggaatgggcttcatttcagcatttttatcatcaataatgaataatatgcctacagttttaatagatgcgattgctattggtcaatcaaatatccatggcttattaaaagaaggcctaatttatgcgaatgttatcggttctgatttaggtccaaaaattacaccgataggctctttagctacattactgtggttacacgtcttaacacaaaaagatgttaagatttcttggggcacatactttaaaaatggtatcatcattacaattccagtactatttttcacacttttaggattatatctaacacttatactattttaagaaataaaaagacgctttctatttattgcgatagaaagcgtctttttgtacttgagcaagtcatatcataacttaactctaacaatttacttattcaaatgtttactgtcatctttatacacaaagtatttgaagtattttccttcagtcttcatattcttataaaagtcagcgataattgttgcattactttctgcccacttaatatcagtagcatattgatgttctcctggattttttggattccatctcatactatacaatgtattttgatctgtgcttgataagaagtgcttatgaatgaaatcagcaccgcctgaaatagctttttcaggtgtatcccaaccatgctttttagcatattctgcacctgttttaattgggtctttatcaagggctcctactccatagaaattgtagtatttttttccattaatttcgactccattagctaattcacttttaactgcgccagtttctaataatgcatgtgaaattaaataaacttcgttaacgtgcttatctttagcagcttttaagaaatcatccgtatgcttcaataatgttggtctatctactaacatacgtttaattctatttttatcaatcccttgatactttgataaatctaaaaattgatatttttgcttttcattatcgataaaagtaccgctatccattgcacttttaatttcagttgcagatgcatctctccatgcatcattctttttatttgatacctgttgactcgtataattatttatttgtttctttgctgcatcgtttaatgtaacatttaacttttcaatcttaatgtcggatttaacatgtttgaaaaatatctgatcggatatcattgagaaaaataaaaatgagacaacagcaaatatgacaacaagtcctattattccaaaaatagaacctttcttgtgtttattcatatccacacctcttaggtcattgttgttatacattcagtttgactacgataataaagtttaacattattaaaaccgtttaacaattttatctatgcattgttacatattcataaataaacggtaatgtaaatgaaacgttttaaacgatttatcaacattactatactttgattcacgaatcataaatgttttatctttttgtataacctttgaaaacctttatatcaataatcttattattcacgtattaaaaaacaaaaattctcttgttcgtttacttagtttcttttttataatccatcataataaaacttgctgcatttgatctatttttataatagtactgatttaaatcaatcgtaccttcaatttgaccatcacgatacatcatttcattagtgaagttatttatcatcacgaaatcagcgcgatctcttataacatctaaatcgtcgtttcgtgcaaaaaaatgttctaaatttaaatgtgcgtaatccattgttacctcccgattacaaattttgttctatctactatttagcaaagtaataatacatcatatcacattaaattaattacttatgtcttatatttaacacttaatttagcgattacgcaaatgaatgatttttctaaatattttattctaattttatccggaaatatttgttatacgtataacttggagaatgactacttgaaatttaatgacgtatacaacaaacaccacaaaatcatacaccatcttttaaaaaaatataatattagctataattatgatgagtattatcaactactcttgataaaaatgtggcaattgagtcagatatataaaccctcaagcaatcaatctttatcctcttttttattcatgcgactaaacttttaccttatcgatctattcagacaacaaaaacgtttaaatgatatcattttatgtgaaaatcattcaccaatacttactgaacagccaacatactttaatgaatatgaccttcgtttacaagatgtttgtgccctactaaaccacagggaacgacagtggcttatgctttatcttgaaggctataagcaatatgaaattgctgatagtatgtcattatcaacttcaacaattaaattaataaaggcatcagttaagcgtaaatgccaacggttttttgaatagatgcgacgcgtcgtgttgattaaaatgattaatactcttggaacgctcaataatatgcacttcatttatgcgaaccattttattattaactgattgaaaaggagcactatatttgcaagacatttctacaaaacacctactttatatccaaaccgcaacttcgaaccatcttgagacaaaatgtgtctttctgtaccatgaatacaatctcgaattccctattactaaagccattccttattatgctaaattgcattttacatcagcatcaattttaatcgatgcggcaaaaagcatactcaacattaacaagctggtgcctatttaccttaatccaaaaacgattcttttcccaataaaacaaaagcgtgcaccgatacaaacatatatcaatgcacactatataattggtatgacggaaatgggcaattcgactatgctccatttcaaaaatggtaaaacattagaagtcgatgaacccatgtctcttatttccaaaaaatgctatgaaagtttagcattgaagcatttcattgaaaatactaatgaccattaaatttatgttctaacagtttctttgtaaaatatgatgttgtgatttttattaaatagatactaactaacattaataaaatcgccccaatgattgttaaaataacaaccgttgtcgacaattctactttagggttaacgaaaaattgcacaccagatagacttgtaattaatccaaataaaaacaaacctaataaagcaacgtatgcaaacatcatcactactaatgttacaaagacgctataacttttagtttctttactacgaaatacattttctcttaagtaaccattagcaaaggtgattggcttattaaagttcacattgtccttgtcagtaatactagacaaccgttgatctaatgcctgtttttcctttttgttcaaaaaccataattgctttttaacctttttatcgaacgatgctttattcataattaaggatttctctcctttttcatattgacgctattttatacatgattgccaatgaacattgtattttatatattttacagaaatacatgcatcaaatctacaaaattaactttgcaattttatttttagtaatttgacacggtataattaacaccgtttatattgcaaacaaatggttttagttatgtgtaatgatgcgcctttaatcatgtctaagtttctcatataatgaaaatgaacataccaatgaaatgctttaatatttattttaaagatgatagaaaggactaaatatgcagaaattcaaggatttgttttacgatgatttatcagttgcacgtggaaattattttctaactttattatccgcattctttattactattattctactaattggcttcgttgtcagtgatacacacatactttatggcgtgtttatagtgctcatcggtatcgtgttattacggttattcaaaattaatttactctcattttaaaaattaacattgtcacaagtgatttatatcatcggtggtgcattgctaatttatgggttagattatctttatttacattttcatgacgtaccgacaaatgaacaagaattagatcgagaattacaacatacgcctttgtatatgtctattgtcacaattgctattatccctgccattgtagaagaaatcgtttttcgaggcatgataataagagttgtatttagaaagcatttatttattggattagttgtgtctagtctagtgtttgcatcattgcatgaatcggatacttggattgggtacttaccttatttatattctggagtgatttttggcctaatatatttaaaaacaaagcgattagaagtcgttattttaatccactttataaataacctatcctcattactcattctgatatggggataatactagttgatataattcacaatgattacccctcaacatgttattcacaaaacgatatgcactacaaattaatgatatacaagcttttaaagcaataaaaaatcttgtataattaacttaattttcataaaaattaaacgtcaaactttattttaggagaattaatatgttttcgaggaataacaatatttttgttgatgatttgtctgtaacaaaggacaattatttaattgcagttttaaaaatgttggtcatttttttagtaattaattatggaacagacgtcagttatgaccatgagtatgttgggctatttattatattactaggtgttgtacttcttaaagttttaaatatcaatttattatctttcaaaaaattaaaattcactcatatgctttatattatatttggatttttgttgatgtatggattagattacttatatgatatgttcgcaccgcctacattaaatgaaatattgatagatgaagagtctgaagatgcaccttaccacttagctctgcttagtaatgctatcattccaccaattacagaagaaatcatctgtcgtggattgattatacgaattttatttagaaatcatcttttcttaggttttattgtttcaactgtattcttcacgctaatacatgaatcagacacgctgattggttatcttccgtatttttattcaggtttaatttttggctatacttacttaaaaacaaaacgattagaggtaccgattttaatacattttatcaataacctcttagccatgtaacaataaaatcattaattattttgatatttacatgatgacaccaaagcttttacaaagtattaataggtgactttctaaatgttattgcatatttacgttctgtaattatatcaaaacaacaaaatatattaagtttagctatgaaaaaatctatcgtcatagattttttcatagctattttttatagttatcgagcctatcccagactctctatactgttatattaacagtcattgactgaatgataataagcttttcaattataggggccccaacacagagaatttcgacaagaaattctacaagcaatgcgcgttggggtacggggccccaacacagagaatttcaacaagaaattctacagacaatgcgcgttggggtacggggccccaacacagagaatttcaacaagaaattctacagacaatgcgcgttggggtacggggccccaacacagagaatttcaacaagaaattctacagacaatgcgcgttggggtacggggccccaacacagagaatttcaacaagaaattctacaagcaatgcgcgttggggtacgggccccaacataggaaagattaactcacaataatgtgcaagatggcggtgcccaacatagagaaattgtatttcaatttctacaggcaatgaaatacatattaatttaaaattgactccaatatttaaacccccataagcacaatgcctatgagggtttaaatatatttatatattataaaatagaaagacctgaagattgaatatctttcgcaaagcctttaactgtatctactgataattcgttaatatcgcgacctaagtttgtattcacttttttcacaacatctgctgggcatgtaataatatctgcaccaatttcatcagcttgaatcacattgaataattcgcggcaacttgcccataataatttaacgccgtctttactatgcgtaacttttacagcctctttcattaatggtaatggatctacgcctgtatctgcaatacgtcctgcaaatactgaaacatatgttggcacaccttcagttactgcttcagttatttctttaacttgttcaattgtataaacagccgtaacgtttaatctcacattgtcagctgaaagttttttaattaaaggaatcgttgattcaccttttgtatttacaataggaattttaacaaatacattttcgccatattgttttaaaattgctgcttctttttccatagtttctaaatcgtctgcaaatacttcaaatgaaattgaagcatctggaatttctttcacagcttcttcagcaaaagctttgtaatctgttacgcccgctttcgccattaaactaggatttgttgtaaaaccatccacttgtttgtttttataagctgctttcatttcttcaatatctgcaccatccgcaaatacttctacatttagtttagccatataatatagcctccttgattcttattaaaattttaacaacatctgcatgtctttttcttacaaccatttgtaaaaaatgatttttatttctttgttatataaaacatttatatcacgcttttataatatatagctaattttttgcctatatttcttaaaaatgactttagcaacattgtgtcaacaaggtaattaaactattgttttatgattgtttatgatacgatatgtaaatgataaccatccaggaggtctagcatgtctcgttcaaaaaaatacttttacttatctagcttaatgattattttaagctttttctttaatacaaataacgttttcctaagtgggctttttaattcttttattaaattaatacttttctgcagtgttattaactcaattatactaatattgtctataatttttgcagatcgttcaattaaatcactaaagcctgatgcagattggattagaattgcgagtaaaagtttgccttggattattctaatcgttattttagtacatatcttttcgattgttcacacattcggttttatttaaaaaagataaaatgtcaatgtagccttaatacaaaacaatacaatgtatcatactaaaatgagtaaatccatttgatgacgttgttgcgtataaaaaatattagattttcgaaatcataactatgcatctaatcgctatagttatacaacaagatataacatataatgaggtttgataatgcatcgacaatttttgtcgtcgcgttgccaaaacctcttttttaaattcaaactatttcttttcgaggtgaaccaaatgcaatatgtatatatttttatcggtggtgctttaggcgctttattacgttacctcatttcttttctgaatactgacggaggttttccaatcggaacactgatagcaaatttgactggtgcctttgtaatgggattgctaacagccttaacaattgaatttttttcaaaccatccaaccctaaaaaaagctattacgactggttttcttggtgctttaacgactttttcaacatttcaattagaattaatacacatgtttgatcatcaacaatttataactttactactatatgctgtaacaagttatgtctttggtattttgttatgttacgtcggtataaaactaggtggtggtttatcatgatatcaatcattttagtcataattggcggcggtttgggtgcaatagctagaagtgccgttactgattattttaatcatatatttacttccaagttacctatcgcaacattgatagtaaatcttgttggtagttttttaattggattaactataggcttatcaatttcaatctcatggttccctgcgttctttgttaccggttttttaggtggcttaacaactttctcaacgttagccaaggaacttacattaatgatgacaccaaaatttaatattaacctttttctcaattattcacttttacaattcatcattggatttatagcttgttatattggctatcatatttaaaaataaaatgcttcattcagcaaataggtaaataatgacaccttcctgaacgaagcattttttaattttcatgcaaattttttaacaccatataatgcctatcaaaataaaacaatctttgttgccgtttaaataatgtgaatgtcaataaattccccaaactagtcgaaaataaaacgttaagcaatatgtctattacctaacgttgacaatttatctgaccatatcaaaaattcaccgatttgtttcctagccttcaaaagtttttggatcaggtccaattctcttatcttgatttaaaccatcaattcgcgtcatttgttcatctgataattcgaaatcaaatattcggaagttttcagagattctgtttggtgtcaccgatttagggattgtaaccactccatgctgcacattccatcttaaaacaacttgggcaggtgactttcctaattcttgagcaatgtctttaattgtctcatcatttaaaatttgtgcattcatcaatggtgaccaagattccatcacgatatgttgtgctgccaaatataatttcaatttatgttgcgttaaatatggatgatattcaacctgattaattacaggtttaattgacacttgtgccaacaaagcttccaaatgttcaggttcaaaattgctgacacctatatttttaactttattatttttatataaatcttccatacctttccatgtatcaaccattacggcttcgttcgtacctggccaatgtactagatacaaatctaagtattttaaacctaatctagataaactagcttcgtaagcagctgctacattttcacgaccaaaatcctcaaaatataatttcgaagtaataaataagtcttctctagcaataccagttgattccaatccggcacgaataccagtaccaacttgttcttcattcccataaacttttgcggtatcaatactacgatatccttgttcaatggcatacttaacactttccatgcaattttcatcattttccacacgaaatgtccctaaaccaatttgtggcatcgtgtttccattataaaatgttttaacctccataaatatcgcctcacctttttgatgtattataccctgttatcataacaaatctgagttgaatacatgataaaaaacacttacagcaatcaaccactaaaatgctagtaatatctttcaaatattaatcaaaatgttaaagaaattctgtttaatttatgacaaactaaaaaagccgaagtaacaacatatagtcatcacttcagcctaacatttaattgaatgattcaattttatccatcatttgttgtaagtcttccacgttgtattgaatacgaccatggaatacaaatttgttaaagaattcgtctaattgttcagcgcccacaagtactttgactgcactattttgattgtaatttgaaatcgttacatcgccttcatttttaggattaaagtataaaattgaagtcggtgtatatttagcacctaaatgtttttgtaagtcttcagccaattgtttaatcgcctcaatttgatctgaataatttacaaatgataatgaacgtttgtcatcattttgatccatcacaatagtttgcggtctagatttatctaaatctaatgtatcaaatacttgttccattggtggtaaatctttaaattgaccgccactaataccattataaacatgaccttttaacaattgagaatcaataatataaagaccagttcttgttaatactaaatgactaatacgttcaatattattaaagccatcctttggtaaaaagatatttgccataatgtgcatatcttctggtcgaattcgtttttctttaactaatctttcacgaataccaattaatctcatgtccgttacatattcactatgatttttcgagaacaattttaatgcgtcaatctcacgatcttttgtactaaccatgtgattataatcttcttgttgttttgtaattgtctttttattttgaatacgctctttctctaaagcttcttcatgagactttttaatgttttgttcttgttgttcatacttttcttctgtttgtcgcttaacttttttcttactacctaaggcaactaagaaaaggacaaaaaagattaatgcaatgactactgcaataatgagtccaatgactaccggtgaagataaatccatcacaacaacgctcctttttaatatatgaataactttaattataatagaaaagctaaagattttcgatacatattatcatttatataccgaaaatcttttatttagctatattcaattcatcttattattttactgcgtcttttaattcttccactttgtctaatttttcccatgggaataagacatctgtacgtccaaaatgaccataagcagcagtttgtttgtaaatcggttgtttcaaatcaagcattttaataatacctgcaggtcttaggtcaaagtgttttctaactgcttcgacaagttgcccttcagaaactttacctgttccaaatgtatcaattgcaattgacactggttctgcaacaccaatcgcatatgccaattgtacttcacattgatctgctaaacctgctgcaacaatatttttagccacataacgtgcagcatatgcagctgaacggtctacttttgtaggatccttaccactgaagcatccgccaccatgacgtgcatagccaccgtacgtatcaacaatgattttacgtcctgttaatcctgcatcaccttgaggtccaccgattacaaagcgtcctgtaggattgatgtaaaatttagtttggtcattaatcaagttttcaggaacagttggataaatgacatgcgctttaatgtcttcttgaatttgttcaagtgtcacatcctcagcatgttgtgttgatacgacaatcgtatcaatacgtacagggttatcattttcatcatattcaacagtgacctgaactttaccgtctggtcgtaaataatttaacgtaccatctttacgcacatctgataaacgttttgccaattgatgtgataaataaattgctagaggcatatacgtctctgtttcattcgttgcgtaaccaaacattaaaccttggtcacctgcacctgttgcttcaatttcttcttcgctatctttatcacgatactctaatgctttatccacgccttgtgcaatgtcaggtgattgttcatcaatcgcagttaaaattgccattgtttcataatcatagccatattttgctcttgtgtatccaatttctttgattgtttctcttacaactttcggaatatcaacatatgttgttgtagaaatttcgccggcgatcaatgccatacctgttgtaacagttgtttcacaagctacacgagcatttggatcgtcttttaaaatagcatctaatattgcatctgacacttggtcagcgattttatctgggtgtccttctgtaacagactctgaagtaaataatcgtttgttatttaacatagtttgctcctttaaatttatattacgaaaattctctctctgtgagctaaataaaaaagaccttctaactattaatatagagagaaggcctaatacgtccattcgctcttatcgttcagacctatttgtctgcaaacggtttggcacctttcttttataaaaaaagaggttgctgggtttcattgggtccatgtccctccaccactcaggataagagaatccgttaaaaataatagtacctaattaatgaattaatgtcaatttttcataaataaatttccagtaaaatattgtagattaattatgttaatgtgttatactaattaaatgtaaaggcttacatttaaattatcgctttggagggatttaggatgtcagtagacacatacactgaaacaactaaaattgacaaattactgaaaaaaccaacgtcacattttcaactttcgacgacacaactttataataaaatcttagacaataacgaaggggtattaacagaacttggtgctgttaatgcaagtactggaaaatatactggtcgttcgcctaaagacaaattttttgtctctgaaccttcatatagagataacattgactggggagaaattaatcaacctatcgatgaagaaactttcttgaagttataccataaagtactagactatttagataaaaaagatgaattatacgtatttaaaggctacgctggtagcgataaagatacaatgttaaaacttacagtcatcaatgaattagcatggcataatttatttgctaaaaatatgtttattagacctgaatcaaaagaagaagctacaaagattaaacctaacttcactatcgtttctgccccacattttaaagcagatccagaagttgatggtactaaatctgaaacctttgtcattatttcatttaaacacaaagtcattttaatcggcggtactgaatacgctggtgaaatgaaaaaaggtatcttctctgtaatgaattatctattaccgatgcaagatattatgagcatgcattgctctgcaaacgttggtgaaaaaggcgatgtcgcattattctttggtctatctggcacaggtaaaacaaccttatcggctgacccacaccgtaaactaatcggtgatgatgaacacggctggaataaaaacggggtcttcaatatcgaaggtggctgctatgcgaaagcaatcaatctttccaaagaaaaagaaccacaaatctttgacgcaatcaaatatggtgcaatcctagaaaacacggttgtttcagaagatggttcagtggactttgaagacaatcgttatacagaaaacacgcgtgccgcttatccaattaatcacattgacaatattgtagtaccatcaaaagcagcacatccaaatacaattattttcttaactgcggatgcatttggtgttattccaccgatttcaaagttaaataaagaccaagcaatgtatcatttcttgagtggtttcacttctaaattagctggtacggagcgtggtgtgacagaacctgaaccatcattctcaacatgtttcggagcacctttcttcccgttacaccctactgtttacgctgatttattaggtgaacttatcgatttacatgatgttgatgtttatcttgttaatactggatggactggcggaaaatatggtgtaggacgaagaatcagcttacattacacacgtcaaatggtaaaccaagcgatttctggtaaattgaaaaatgcagaatatacaaaagatagtacgtttggtttaagcattcctgtagaaattgaagatgtaccgaaaactattttaaatccaattaatgcttggagcgacaaagagaaatataaagcacaagcagaagatttaattcaacgttttgaaaagaacttcgaaaaatttggtgaaaaagttgaacatattgctgaaaaaggtagtttcaacaaataaatttgcatactaattaaagagccaaccgttgttatagtctaacaatggttggctcctcttattttatatggtaaaaatttataggcaattttattacaacaatcacatttaaggtgaccttcatgccaaactcacatcactcattcaatggaagcaccacgtcttcacataaagtaccgatcctttacgctatgcatgttgccccgctttgcataaagtacttatcgttaactcaacgcaagttgttcctattcacaaaaagcacatacagttatctgcatggagcacattttcattgaaagcgcgtaccgctcattcaacgcatgtagcaccacatcttcaaagattgatagttcccatgcgcacaccaaattttatactagctatgcaactcaacttggttcataaattctttaatataagtcaatgtttcaaccatcgctggtggtcttggcacatgtccttctgccatttgataaaatctttcatgcgtggcaccttttaactctagttggtccgctaaataatacgcatgatgaataccaacttgttggtctttccctccatgtacaattaatatcggcggactgttttcattaatgtttggaatcgcttggcgtgcctcatatgccgctcgatcttttttcggatgaccaatcattcttcgtagcatgcctcttaaatcgacacgttcttcatacattaaatcaatatctgagacaccaccccagattgtataacttgttactggtaagtcttgaaatgtcaacaatccttgtagtccacctcttgagaaaccaaccatatgaataaaagcttgcggatatttatcatgtagcaaccttaataattcagtcacatcatttaaatcgccacgataaaattcatctttaccttcactcccattgttacctcggtagtatggcccaatcactaaagtttgactatctgaaaattgcattaatctacctgcgcgcacacgtcctacttggcctttgccacctcgcaaatatactacaatgcgttttacttcatgaagtggtgtcatcattaaagctttgacttgtaaatcatctgacaaatatgtaatttcttcgaattgatgcgtaacagattcaattggcattcgtttacgtttgataaaatccaagtgattgcaccctctctacgcattttaaaatggtactatcttgtagtaagaaactccgttgtgcgagttcaatatcattgatacagttaaacaacactggccctgctgtttctaaataatcattcttgcttaccaatgattcaacttcgataaaatatacatcttttacaaaatcagtttgatcatgtgtttcaatggtatattgcgctatgtaatgaatatttttaactttggcgcctgtttcttcatataattcacgggtaactgcttcagcactactttccccgcgttcccttttaccaccaggaaattcaataccccgtaaattatgtttggtaaaaagcaattgatttttaaacgttggaatagctagcacatgattaccatctgctatctcattatcctttttaaatgtcaaattaacttgacgattatctttatccctaaacttcacgcgcatcacatccctacattgtatgttaatataatagttaatcactattgttggaggcattaattatgaaaaagatattcttggcgatgattcatttatatcaacgtttcatttcgccactcactccaccaacttgtcgtttttatccaacatgttcagagtacactagagaagcgattcaataccacggtgctttcaaaggcctttatttaggtatccgtcgtattttaaaatgtcacccgtttcataaaggtggctttgaccctgttccattaaaaaaagacaagtcagcaagcaagcattcacataaacataaccattaatatggttgtaattgagttatatctactaaaggggggcgaaattcgagtcgtccctcttttaatatgcctgaatgcgccaccacatcttgttcaaaataataacctgctggtgtaacatctcctggataatcacctttacgagcaagcatcgctgtaaaataacggcttaaaccatattcatacatgccgccaataaccacttttacaccatgacttttcaaagtatcaattgccgtttgcactttatcaatgccacctagacgaaatggttttaatacaacaactttcacattgtataattctattaaattaataatgttcgacaacgacgtcgccttttcatcaagagctattggaggtattgttccatccactacttcatcaagcattgagatatctttaaatggctcttcgatataaagaacctgttcactcgctaataactgtaactgtgtgaaatcttgacgaatcaaggactcatttgcatctataaccaattgaaagtgaaagtctaattcccgtaacactctaatttgatgcatgatttgaggtgtccattttaatttaattctggtcggctttgttgctttcaatgactctaattgtttatttgataagccgctcgctgtcgctccatatgctactgaaaatgaaggcagtacatgaaacatttgatacaatgccatgacaatagttgcccttgcagcaggcgtattttccaatgaatctactagttttagtgcagcttcatacgtttcaaatgatttatttctattatcttcgaaccattgctcaattacatgtttcactgaagcaattgtttcatgatcataccaatctgtttgaaaagcgttacattccccgaaatatgcatttcctttatcatcaatcaattcgataaacaaacaatcacgatgcgttaaagtgactttcggtgttacaatttgtgacttaaatggctcactatatttataaaaatgcaaagctgtcaacttcatcaaatcatcctctatacaacttatttctttgtaatttacctgttgatgtataaggtaaagtatcaaccttttcaaagtgtttcggtactttatatttcgctaaatgttgtgataaatatgcaatcaattgtgcctttgaaatgtcgctttcactgacaaaatataatttaggcacttggccccaagtatcatcaggatgccctatacatactgcgtcactgatacctggaaattgcttcgctaccgtttcaatttgatatggataaatattttcaccgccactaataattaaatctttacgtcggtcataaatcatgacataaccttcatgatctatttcagcaatgtcacccgtattaaaataaccattttcaaacgtatccgttaaatctgttggatacaaatatccattcatcacattggcacctttaatcattaattctccatgaccttctttattaggatttttaacttttacgtcaacattggcacttggcatgccaacggtatcaggacgttcatgcaacatttgcggtgttgtagttaaaaattgtgaacatgtctcagtcataccaaatgaattataaattggcaggttatattgtaatgccgtctctatcatagtggcagataatttcgcaccgccgagtaatattttttgtaaatcatgaggttcatgtaaaccttgttgcataagccaatttaaagtttgtggcacaagcgaaatgtgcgtgatgcgttcattttttatcatcgttaaaatttgttcggcattaaatttatcaacaatgcgcacagtaaacccttcaataactgctcttaaaagtacactgagacccgaaatatgataaatcggcaagacagatagccaattagtatcatgatcaaatcccaagctctctttacatccgattgcactggcataatgattacgaaacgtttgtggcaccgctttttgagggccagttgtccctgatgtaaacataatcgatgcaatgtcatctatattaaatgatgtatttaatatgttggacggcgaatctttcggcaccacagtttcattcaatgtatcatattggatgtccaatgtgttgtccattaaatcgttcattgtaatatccgttccagcgaattcaatatcatccagcgatacaatttgaaaccctcgcaattccagtggcaaggtacaaaaaatcaattgtacatcgattgatctcatctgattcttcatctcattaggtgtcaaccttgtattaatcatcgcaatttcaatatttgccaaccaacatgcatgtattaaaataatcgattgaatcgaattatctatgtatagcccaacacgagattgttgataagccttgagtcttctagccaatagactcgcttcacagtataaattttgataagtataagattcttgaccatctgttatcgcaatatgatgtccattttgttgtgcttgtttatataaccaaaagtccatgcgctattcctccaaaatcatttacattataattataacgattttatgacattctagcagtggttatgtttaaaaatataaaaaagtagacgaattgattcattgatatgattgttatgaatcgtctacacttaattggacaaattctatgagaatagatattgttaatttaagaaagtaggcgattttattatgacaagagaaagaagatcatttagttcagagtttaagttacaaatggttagattatatgaaaatggtaagcctaggaatgaaattatacgcgagtatgatttaacaccttcggcgttaggaaaatggataaagcaacatcaaaacacgggtacattcaatcaccaagataacttatcagatgaagaaaaagagctgattaaattacgtaaagaagttcaacatttaaaaatggagaacgatattttaaagcaagcagcgctgatcatgggacgaaaatagaagtcattcaaaagaatgcacatcaatattcagtatcagcaatgtgtaaagtcctaaaaataccaagaagtacctattatgattctataaaaagaaaagataataaaatcactaaagatgattcaaacgtagaacgtgctgtcataaatatttttaattctaatagaaaagtctttggtacaagacgaattaaaaataatttaaatgataagggtcttactgtatcaagacgaaagataggtcgtatcatgaaaaaacataatctagtttctgtttatacgaaagctaaatacaaaaatcatccaaaagaaactaataaaaaacgaattaaaaatcatttgaatcgcgcttttaatagagaacaaccaatggagacattagtaagtgatttgacatatgtaaaagtcgcaggaacatggcattacatatgtttatttatagatctatttaatagagaaattgttggttacagtgcaggtaaaaataaggacgcaaatttagtatcaaaagcaatcagcagaataaatcataatcttgaacaaatcaaactattccacactgatagaggcaaagaatttgataatcatttgatagatgaagtcctagaaacatttaaaatcaaacgttcattaagtaccaaaggttgtccttatgataacgcagttgcggaagcaacgatgaaagcaatgaaaaccgaatttgtaaaacaaatgcaatttgaaaacttagaacagttagaaacagaattatttgattatgtaaattggtacaacaattttagaccacattcttcattacagtatttgacgccagtggcatttaaaaatctacacatgaaaactgtctaaaaaattgttgacataccattataatgctcaatacatatcgttatatcactcgtctactattatcagttatttttatttaattttagtgtaagtctgtcattctgatgtggtgatttacccattgttgccacatcatctgcaatgtcaattggtatacgattcatgtcttgtaatgcacttaaatggaatacttcatcatctaaattttcaatgagatatacataatatgttaccttgtcctttttatattttaacgttttccaaaattccggcttgcaattcaatacattgtccggaatatattcaataaataagtaacgtttgctgcctactttgtctacgaaatattttgcagtgcctttttctatacctcttatatgtgcatagtctgctgaaaagtaaatactacctattgtttcattatgttgttgtatttcaaatcgttggcctactattttattatttgtgccacaactacttaaaaaaatcagtagatatagcattaaacatattttcatccccttgaattttaaaaactttttcaaaagcaacacctctaaatataaatacaatatattatatcaaatagaaattattattttgttaaattatgttgtcatgttcgtgtcattttgagtcgtaatacaactttaaaattattaaattaacacttctgcaatccaaaaatatttttaaagttttgaaaaaaattaaagtatttccactactaatttggtaaaatatgattatgtgatatagtgaaagcgttttacacttaataactccctcttaaatgcatccaggttttatgtagtaaatcatgaaaataacatataaatatagaggagatttacctttgaatacagagaacaacaagaatcaaaaccaatctgctaaaaattctgaaagacgtggcatgttaaaaggatgcggcggttgccttatttcttttattatattaattatcttattatcagcctgttcaatgatgtttagtaataatgacaattccactagtaatcaatcatcaaaaacgcaattaactcaaaaagacgaagataaaagtgaaaatatgcctgaagaaaaatcagaatcagaaacagataaggatttacaatcaaccgaagaagtacccgcaaatgaaaatactgaaaagaatcaacatgaaattgatgaaacaacaacaaaagatcaatcagatgatgaaattaacacaccaaacgttgcagaagataaatcacaagacgacttgaaagatgatttaaatgaaaagcaacaaccaagtgaccatcatcaatccactcaacctaagacttcaccatcaactgaaacaaacaagcaacaatcatttgctaattgtaagcaacttagacaagtttatccgaatggtgtcactgccgatcatccagcatatcgaccacatttagatagagataaagataaacgtgcatgtgaacctgataaatattaaacaacaagcgaattgaattcaaattgtatttagctttatgcactaatcacatagtaaaaaatgagggagattttttaggcatgagcaatcaatttaaaagcgaagaagagcgaagacaatgggaacaattccaagctttccaaaatcaacaaaaccaacagtaccagcaatacggacaaaagaaatctaaaaaaggatggttctggggctgtggtggttgtctagtattatttattttaattatcatcggtatttcagcttgtacagctggtattacaggtaaccttggcggaaatagttctaaagaaacgaacaaaacccataaaattggagagactgtaaaaaatggtgatcttgaagtcacagttaattcagttgaaactatgaaatcagttggtccatctatcgcgccaacaaatgctaaaggtacatttgtcgttgctgatgtgacgattaaaaacaaaggtaaagaagcgttaacaattgatagttcaatgtttaagctaaaatccggtgataaaacatttgaagcagataatacaggttcaatgtctgctaatcaaaatgacaatggtagtatagaaaattcatttttcttacagcgtataaatccagatagcactgctcaaggtaaaattgttttcgatgtgtcagaaaacatagccaacgcaaaagataaaaaattagaagttatttctagtttatttagcgtcaagaagattacatttgatttatccgatgctaaaaaaacatcaaaagctaaaaaagacaagcaagatacagaagtagctgttacgagttcaaatagcgataatgtaaattatgaagcttcggctactacacctgctacaacttctagtgcggatactgattctgaagatagcgaaaagtctagtaaagatgaggataagcagaatgcgtctaaaagtgataaatctagtgtagaaaaaagtgaatctaatgaggaaactgctcctgtagagcccatgccccatagcaaacctaccactagtgaagcaccacctagtcaaaatattcacaatgaaaatagtatgtacgacgcttcaacagaataaaatttcagggtagctcggctacccttcttttacggaaaaattaattatacataatcaaatcaaggagataaaaaaatgaaattcaaagctatcgttgcaatcacattatcattgtcactattaactgcctgtggtgctaatcaacataaagaaaatagtagtaaatcaaatgacattaataaaaagacgcaacaaactgacaacactacacagtcaaatacagaaaagcaaatgacaccacaagaagccgaagatatcgttcgaaacgattacaaagcaagaggtgctaacgaaaatcaaacattaaattataaaacaaatcttgaacgaagtaatgaatatgaatattatgttgaacatctagtccgcgatgcagttggcacaccattaaaacgttgtgctattgttaatcgacacaatggtacgattattaatatttttgatgatatgtcagaaaaagataaagaagaatttgaagcatttaaaaagagaagccctaaatacaacccaggtatgagtgatcatgatgaaacagatggtgagtcagaagacattcaacatcatgatattgacaataacaaagccattcaaaatgatacaccagatcaaaaagtcgatgataaaagtgataaaaatgctgttaataaagaagaaaaacacgataaccgtacaaataattctgaagaaactaaagttaaataatggcatactttgattaattgtaatttttaggagaaccgctatgataacatttgaaaatatacaacaacttgaaaaatacaccttaatgactatgcatggtctttttaatcaacttaaactcggtattatttcaatcgacaatgcagagcatttgctctttacaccttatatgatggaaacactctcttccctaggtgtgaaaccagacattatcgatttaattcacaaagggacagagttagaagactttgcagcatttaatttatcaattgatgatacagttacagtctgtttacaaagatctgaagaactattaaaacaatacaaaagtgtagaattcaatgacaaaatattaatcaattggcgcgttatacaaaagtaatagacatataaaagtcgaacgtaactaagtgggtattgattttattctttctaagttacaagtatttcattttataaagtttgaaaagaggtttattgaaatggagaaaaacgaatatacagctaaatataatgaatatagtcaattattagacgctacttactcgcaagctgtagcataccttggtatgtcaacaattttttagacagttttcatgtgtagatttttaaatgccactggcgtcaaatactgtaatgaagaatgtggtctaaaattgttgtaccaatttacataatcaaataattctgtttctaactgttctaagttttcaaattgcatttgttttacaaattcggttttcattgctttcatcgttgcttccgcaactgcgttatcataaggacaacctttggtacttaatgaacgtttgattttaaatgtttctaggacttcatctatcaaatgattatcaaattctttgcctctatcagtgtggaatagtttgatttgttcaagattatgatttattctgctgattgcttttgatactaaatttgcgtccttatttttacctgcactgtaaccaacaatttctctattaaatagatctataaataaacatatgtaatgccatgttcctgcgacttttacatatgtcaaatcacttactaatgtctccattggttgttctctattaaaagcgcgattcaaatgatttttaattcgttttttattagtttcttttggatgatttttgtatttagctttcgtataaacagaaactagattatgttttttcatgatacgacctatctttcgtcttgatacagtaagacccttatcatttaaattatttttaattcgtcttgtaccaaagacttttctattagaattaaaaatatttatgacagcacgttctacgtttgaatcatctttagtgattttattatcttttctttttatagaatcataataggtacttcttggtatttttaggactttacacattgctgatactgaatattgatgtgcattcttttgaatgacttctattttcgtcccatgatcagcgctgcttgctttaaaatatcgttctccatttttaaatgttgaacttctttacgtaatttaatcagctctttttcttcatctgataagttatcttggtgattgaatgtacccgtgttttgatgttgctttatccattttcctaacgccgaaggtgttaaatcatactcgcgtataatttcattcctaggcttaccattttcatataatctaaccatttgtaacttaaactctgaactaaatgatcttctttctcttgtcataataaaatcgcctactttcttaaattaacaatatctattctcatagaatttgtccaattaagtgtagacgattcaccttttaaataaatatggcgctgtaaccgatgactattataaggaaaaatcatacacgcgatttttaaatggagaaatcaaaagtattacaaaaggaaaatacactagagctagcgaaggattatattgtcatcacataagcgaggacaaattccaaaacttatctgacctaagattcatttccgaatttaagtactcatacaacgttcaaaagaaagaaaacttagtttactgcgatttaatcgagcatttaattttacatgcaattattacaaaagaatccaatggccaatttggtgtggctggattatgtcaaatgatcaaaccaacagtcattgattggtacattggcgaatataatccaaaaccaacatggatgcaagccaccaaagcacgtgcctatttgcctagaatattagtagagaaattactcattaaaattgacgatatgttaaaaggaatagaaatatatgatttccttgagtctagataaatgattaatctagatttattttttgctgttaggattttgttatagatgtttaaacccataattaaatatattttataaaaatagaccacgcataccaatctataaacggacaatgtttataaatgagtttgcctggtcttgaattgtattagttttcttttggttttaataaatcgactgtaaaagtcaatataaaaatgtacatcaatgattgcataggaatatacaaaattgttttctatgcaatttccttcttaggtgaaagatctttgtaatctataggtttactcatacgtttttgggatatcgtcattttgagataaaataactatccgtatttaagtcaagaatatccataaaagcgttacaatcaagtgtatctttaattccaatcttaaaggtaccgtgaggagtataatttatatcaatatgatttaatgggtgtaacttaccattttcgtgcacctcatcataatcgtatcgtaaataacccgattcaaacatctgtaggtttttaagtacttgccatacttcatctttattcggttttgtttcaaaactgtctataacttgcatcaattcagaatccaaatcaagaatcccctgaatttcttttccaaaaaaagtttctttaaacgctaatttcagaactgtaaggttaagcgcatttaattctaaattagtaatagaatcgtaaattattaaattgttactttcttcctgaacttcaacactgaaaggaaaattaaatgagaaaatcttattctcaattacaaaaaacaaccgtttcattttatcaacttttaagatgatataattattacttggtttttctaaaacatcagcatttttcagtaatagaatagcttctagcattaacataataacatgttgttttgttctaattggttcagaagctatttctacgaatcttttagtcattcgtactgtaaactctttcatactaacaccctataccatatcaatatttttgttaattaccttataaattttttcaaaatccacactccccggtaacaatacattaaccatttcatgaattttttcttttgctttttgatcttgaatatgaaacgattggcgcaaaatctcttctacaatttggtattgagatttattttcactagcttctagcatcaatttagatttatccattatttcatcaggttttggcttttccaccttaagttgtcccgtatcgtttaacttttctgctgcatctccaagtttagaattgagttctccattttcttctgaaagtattaaatagcttgtgataaatgaccttgtaagcatcatatatagtgagtttctaatatttgtattactattaagtacagaggtggttatacaaataataaagggaaattctagaccttttatattatttcgattacttataaacaaagcatcttttgttttattttttacttcataacctttaatggatttccacccaaacatttgatcaaccttaataatcaattgttcagcaagttcatagtttgaattattgtcttcaaggaatacgactccaatatcacctggttcgacagtaggatttttttctcgaatatcttgaatagccgatagaactttatccaaatacttgtcatctaaagcaacagaaagtttgaggctggtaatatcttctgcaatattttcaaatctttttaaaggctctcttgaaaaactgtaataatccccttctttttcaattgtgtatccacaggcttcccattcttcatcacttaaccatctaactaccggcctctctaaaagtccaaatcctattgcgtgtgcaaacattagcgtttttggatcagtcctataaactctattcaaaagaaagtcaggcactatttctgtgttttcattatagtaataaatactttgaaagatgtctccggcaatataaacttgttttattgtaacttttttacataattcgaaaaaagcttcattaaaatcttgactttcatcgattagaatgtaatcaaagaacggctcaaatatcccttctgattcaagttgattcagcttttctaaagcatctttacataccgattcaaaagatatagaccagttgtacctttgaaaaggaatttcgtaataatcacaaataaaactatataaacctgaatttttatcaactttagagccccagctacgttctacccaaagtcgctcgccccatttaatttgctcattaactttcatgaaatcaaaaaaagcagggattcgttcattcaaatcttgtgctaaaatcttactataacaggtgaaaaatatttttgacttttcctcgttaacgtaaatatccttaagtttatgtaacagtaattccgttttacccgtgcctgctaaaccttgaattgttactacttttttatctggttgtttgtaaatgaaccttgtttgttctccatcaaatagagtaatatttttcttaatttgttctaacgtatttccagggagttctccatcaacacgatcaatatcattgatacttccagttagtaaagatatcaataactcacctttacgtgcatctataccagttaatgaacaactttcgataatcgaagttatatcatcagtagtctggaagtcaactttttttacaagcttatctctccattttcttggtctacccaaaaaattattataattgtatttatctgatataatcccaagatcttcaataaaatccgcagaaaagtcttcaaacgcatccgtatcattaccaacattaataactaatagcttaacttttggaataagaataacaaccgcttctttataagcgtatttatattttctttcacctactggtttgtttattacatattgaatcgtctacacttaattggacaaattctatgagaatagatattgttaatttaagaaagtaggcgattttattatgacaagagaaagaagatcatttagttcagagtttaagttacaaatggttagattatatgaaaatggtaagcctaggaatgaaattatacgcgagtatgatttaacaccttcggcgttaggaaaatggataaagcaacatcaaaacacgggtacattcaatcaccaagataacttatcagatgaagaaaaagagctgattaaattacgtaaagaagttcaacatttaaaaatggagaacgatattttaaagcaagcagcgctgatcatgggacgaaaatagaagtcattcaaaagaatgcacatcaatattcagtatcagcaatgtgtaaagtcctaaaaataccaagaagtacctattatgattctataaaaagaaaagataataaaatcactaaagatgattcaaacgtagaacgtgctgtcataaatatttttaattctaatagaaaagtctttggtacaagacgaattaaaaataatttaaatgataagggtcttactgtatcaagacgaaagataggtcgtatcatgaaaaaacataatctagtttctgtttatacgaaagctaaatacaaaaatcatccaaaagaaactaataaaaaacgaattaaaaatcatttgaatcgcgcttttaatagagaacaaccaatggagacattagtaagtgatttgacatatgtaaaagtcgcaggaacatggcattacatatgtttatttatagatctatttaatagagaaattgttggttacagtgcaggtaaaaataaggacgcaaatttagtatcaaaagcaatcagcagaataaatcataatcttgaacaaatcaaactattccacactgatagaggcaaagaatttgataatcatttgatagatgaagtcctagaaacatttaaaatcaaacgttcattaagtaccaaaggttgtccttatgataacgcagttgcggaagcaacgatgaaagcaatgaaaaccgaatttgtaaaacaaatgcaatttgaaaacttagaacagttagaaacagaattatttgattatgtaaattggtacaacaattttagaccacattcttcattacagtatttgacgccagtggcatttaaaaatctacacatgaaaactgtctaaaaaattgttgacataccaataaaaggagataacagcatgaggagattactcagtctattactagctagtacaatgattttagtcgcatgtgggaatgctaacaatgaaaataagaaaaaggaagacgaaaaaaaatcagaagtaaaaaaagaagctaagaaaaataatgataaaccaaagaacgaaaagaagaatcaagatataaataaaaacaataatgagcaagttcaaaatgtcaataataaacaaccagtcttaaataataatagtaatcataacaatcaacaacaaagcaataaaaacaattacacagttatagaaaacgggaatagagttacagaaatttataatggacaatcacacacaactacaaataaccctattagagaagaatatgtagagggagaaacagacacgatatataaaagagagtataagcatttttatacacctgaagaagctcaaagagcacaagaaaatagcgaccaaattttaagagaaatgggtctcgaaccagaaagatatgaataaaatcaaactaaataatttcgggtagcccccctacccttattatttttttgctaagaagtaataattatatttctaatatgattaggttcgatgttaatggtagtgatcatgcaaatccaccaaataatgaaagaatacctacgccacatatacacatatatactgaggaatataataatggtggtattgcgattccattaaaagatattgaagatttagaattaacagatgaaattatagaatcattagacttctttatgaagtatactaatataaaacacgataatgttataatagaaccaagattactgtaaaagaaatggagggatacttagtgaagacaatcgaagaaagaatgaacgaatatttcaactggttaaagcaaaattatatcttcaaagaattagatagttctacagaaattactactccctttaagaaccatttgaatgattttattagaatatatgctgatacactacctaataatgaaatttgtctatcagatgacggattgacgattaatgaattagaaatgttgggtattgatataaacacaaaaacgagaactaaacttatacaaaatattttaaatcaatttaatttaaaattagttgataaagaaattacagcggatgttaaaaatgagagttttgctcagtctaaacataatttaattcaaggcatattgaaaatttatgaccttactttaactactaaatctaacgttacaaacatattctatgaagaagtatttgaattcttatatgaccaagaaataagaggtttagcacaagtttctgtttctggagaatcaggtttaaaatattctattgattatattgtttctgaaacaaaatcacaaccagaaaaactagttaactttacaaacaacttagatttcaacaaaataactaatgaagcttatatttaccgtgatatcaaaccaaacagaccatccagaaacaaattagaacctatcatgttgataattgtaaatgatgtagatcatccgataaatgaaagagcacaaactgtagcagaacatgaaaaccttgagatattaaaatggtctaataaatcaaaaatcattgaaactttaacctcataaattagcagtagtcccttatttatattctttaatttccaaaccatatcgtgcaaatagaaaagcagataacttttttatttgcacgttttattttagaacaaaaaagaacaaggtcaacgagtcagaaaaactttttcttgatacgtatttgacacttgctcttttaagaaaactaacaattcattgtatttccgttaaattaacggagaattcggattacctcgatagatttacctctagagtgttaaaaaattgtacattcttaaacaatcataaatgtacgttattaaattatcatttccactggagaatcatgtcgactaaaagattataaaattaaaaatacatttaaaagcacgtcattttcaaatcgccataaaacagcatttttaaaccgctattgacataaaacatatttagaataaatcatttagaaaaattaaataattcaactggcaataaaataactatttacatgaatctataaaacacttagaacaaaagttcgaaaaacgcactttatgattgtatagtgatatcaaatatacttatcagtgagtattaagaaatacttccattttaatactcttagaatcaacaactttattatctccgtaaatatttaaaaacttatatggaacaaaaggtactagttcttttttaggaaataagtcaaaccaaaaacttgtattgttcttttcagtaaattttatatatccagattcaaatgcagaaccatcaaactcgtatagctttttttctttagtgagccagtgtcttgctttgtaatctagttcctgaatagtaaccatattcttatttgtagttattgtaaatccaagtgattgtctattgtcgattgttacctgtacagtaattaatttatctctttcattttctgaactattaaatgtaagaccaccatacatacaacaacctccaaaattttggtttatatccggttcagatttaggtattatacatgtataaaaatatggaacgccaaaaatgtctacttttttatctttataattgttagctaattctgtattttctaattcagttttaacctcattataactcttatactcaattggaaaaattaaatcatgagataaaaactgtctagaattaataactcctcttccttcaacaggtggagacgtataaagattcattacattacccatagttcccttattatttttataatcacttactttatttagttcgtctaatttaggatcgggttgagcattcacataattcatattatgaaaaactatttctagaatcaaaataataattacagtagataatttcttcataaaacctcctctaacttattcagtctatttgacaatgaaccttattataaattcacgcttatagatagttcaggttgtagtgtgtcgatagcattgttttaaaactaaaaattcactagcagaataaattaaaattctatttatcattattactaattacaacaaataattttgaatccgtattcaagataatatataaatttcaaattttactacaattcaaatcattttcctctcatataatggtttaatttcatgattcagttgataatcatcaatcacataatctttatataaaaatacatcaatatgataattagatgagctaactgttctattatcactataaaattgaaaaaactctgctcccactgaaccttttacgttatataaatcataataaaatgattgatcttgatgattatgagaatgaaagaaaatgcatcctttttgtatgttaccggtatctttattgtatattttatataaattttctaatttaaatcgaactttagtgtctaattcttgtactgttactttagcctttttggtttttataacaaaaccttcttgttggacaccatctttaaatacattaacgcctataactttctcttcatctaattgatttccatcatgtatcgtaactcctccgtataagcatgatgttttttcttcagttaagcctacacatttatttccaaaatacagtccataatatctatattttttcctttaaattgatttgctaaatctgatgagttaaactcaactttcaaactagaagttttaagtacggatatatcaatattttttaatattatagtattattcagtagttgatctgtactaattttatttgactcgtctaattgccacgttatatcagtataatagcttgttaaattaaataacttactactatctagatcagattttttctttaaatcttttttgtctacttcagcattaacataattattattaataagacataataaagttattataattgcagctatgtagaacaatctcataagctttttaatattttttataatattctctccctcaattattttttggttaaatgaacttctacattaatagatttactctcaactgttttattatcattataaattagtaaatatttagtcggataaaattttttaccagattcaggcatcaaatcataccaaaaagaatgaccacttccttcgataaactttatatagccagtctcataaggcgaactgttaaattcatataaatttttatgcttaagtaaatagtttctaactttataatctatttcttgtgctgttatgtttttcttattagtaggtatatcaaaagataatgaatttctctcgttttcataaactttaattaagatattatgagagttatcagttgaattatttttatctatttgatttccatcatgctcggtcacaccgccatacatacactttttttcaattaatctaccatcatttaattccatattatccgatgaaaaatagcattgattataatagtttgtcccaaacaaatctacgtttttatttttatatttatccgaaaggcttttattattaaattctgtttttaaaattttagaaccatttattttaaataataaatcatgttgtaaaaacttttcttgggatttaatgtttgtttctgatacgtgtttatcatcatacaaatacctcatattatccattagaccagtgaattcactcgctttattcaattgttctggtttaggattgccatttaacataaatagtaagctgcaagacttaacacatatgaagataaaagcaaataacttcattacaacaactccatattttaattttttataaatttgatgtattacagggaatatttaacgtacacattagccctagagactttaaaatttaaatagttaatacaaatattaatttcgtataaattcgcattttagtgttaaaactaattatcattagttactatctacatatgatatttcgacatcaagatgaaatttttcagattctattattttattatcttcataaattttcaaaaaacttacaggcagtccatctcctgtataaaacaaatcatatgaaaatgatttttcattatttaaatgaaataaaactttcccattattaaaacctgaataaaatttagatttatatccatattctttgcctttaccagtgttattatgaccatatatattgtattcttcttgaagatatctccttaatttaacatcaatttcttgagctgttactagttttttattagttgctattttgtcagtagaaattgttttatgtttgccattaacccaaagattaatagggatttttctagcagaatttaagtattgtcctgataaagtggcccctccaaacatgtatttagatttacaaggaccattataatcaatgccaaaaatatccagtttctttcctttaaatttacttatttcgtcccaattattagattctgagatcaaatcattggtacctgttgaaaattcgagttgatttgcaataggtagatttttatctgtgacgccttttaaatctatataatcatgttttgtatagaaatttcttaagttacctacaccaatatcaccttgagcatacgtaagatctttaatgttaaaaagtaatataaaaactaatataaaactatatttaaattttttcatggcatttcctttactaagttatgattgaaatacttcaactttcgtccttataagatatttctacatctaaatggaatttttcagtttcgacagttttgttgtcattatatatttttaagaaactttcagcttgtcctgttccagtatcaaataagtcataagaaaatgatgaaccatcattcaaatgaaataatatttttcctgcattaaatccagaactaaattttgacttattaccataatttcttcctttatttgtatcattaaagccataaatattatattcttcttgtagatatcttcttaatttagtatcaatttcttgagctgttactaactttttattagttgatactttgtcagtagatatagtttgatgttctccattaacccaaagattaataggaatacatctagatttctctaaataatcacctgctaatgtaactccaccgtatatatatttgtttttcaaacaatatccactataacttagaccatatacatctacagcatgatttttgaatttctttacatcatcaacgttcttaaattcagctgttattgtcgaattatccatagaaaaaactaattgatgcgaaagatgattattttcaggattaatactttggtggtcttcaattggatagctaccataatagttcctaagattcaaaactccgacatcagcggttgcgatatgattttgcgaatagcaaaacaataaaacaacaatgataagtattcttttcatattttatttctcctatatttaaacttctctatctttattatcttttattgtaaaaataaccaattcttcttaaatcatcatgattctatcccacttatatattattactcgttaatctggttttgttatctatactaaaatagaaagctttttatagtaataaagttagatttgaatcactattcgttcttcatcatttactaagctactttgtaaaaatatgttaatatctatagttctttataggattgtaagttgatatccatcaactttcagattgttatgtaaataaataaacatcaatatgatagtctgatgaatctattgttttattatcattataaatttgcaaatattgatctggtaaatttcctttaatataaaataaatcataataaaatgattctttatgctccgaatgagaatgaaatttaatataacctttttgtacatcactagtcattctgtcatacaatttatatgcattatttaattttgttcttactttaatatcaagttcttgtgcagtaactttctttttatctgtagtaacgataaatgtattaacatttacattatccttatacacagctactcctatatttttaggctcgcttaatttattattttcatgaggtgttaccccaccatatgtacaggcagtatccacttgatgctcaccatgacaatgtgctttatagtaaacaccataaatatcaacagtctttcctagaaattctttagaaatcgctgatgagctaaattccacttttaaatctttaaattcagcagatattccatctaaccaatcaatacttttaaataataaatcgaagtctaagaatttttctgtagttgatacaattgattttactgtcgtaaatcgattatttatataatcatcattaatattatgtaaagcaatagggtctacacttgacttcttacacaaactctctattttaggatcttcttcatttgcatatgcattgtttacactacatattgcaattaaatttaaaattaataataatacatttaacattactttactatttttaataatatccctccttcacaaaaattttttcttaataaactgaaaaattctgtttttaatctttaaatattcactaatattattagattacgattttaaacttaacaatcctacttactattgaacaaacaaattttaaattaagtgactcagataatagacaaaaaaccttaaaaatagcgcttaaaatgggtaaaaccattttaagcgctataacggagagtgagggattcgaaccctcgagacgcttgtggcgcctacacactttccaggcgtgctccttcggccaactcggacaactctcctcaataataaatatgtaataaaaaaacagaagcgatatttcacttctgtttgtatgactcctacgggactcgaacccgtgttaccgccgtgaaagggcggtgtcttaaccgcttgaccaaggagccatggctccacaggtaggactcgaacctacgaccgatcggttaacagccgatagctctaccactgagctactgtggaataataatagaaaataatggagcgggtgatgggaatcgaacccacaacatcagcttggaaggctgaggttttgccattaaactacacccgctaatgtaaacgattatggggcggctgaaggggatcgaaccctcgaatgtcggaaccacaatccgatgtgttaaccacttcaccacaaccgccatgaattaagaatggttcaggacagagtcgaactgccgacacatggagcttcaatccattgctctaccaactgagctactgaaccgtaatggtaataataatggcggtctcgacgggaatcgaacccgcgatctcctgcgtgacaggcaggcgtgttaaccgctacactacgagacctattaaatttaaaactatgtattgcgggaggcggatttgaaccaccgaccttcgggttatgagcccgacgagctaccgaactgctccatcccgcgctaatattattttgaattacctagttaatataccatatttaaaaacctaaagtcaagaactttttgaatttaatttaaatattatttcttaaataattacttaaatatcgtagcaacatgttctctgttgaacacaaatattagtatattcatttttgtagtgtacgtcaacgacattttgaaagttttttgtgtaaaaaaaacgcttcttcttcccttttatcatataagtgtctaatagttgtcataattactcatgaactattgaaaaagatgtaggaatcataaattttataatgcctacacctctaacctattaaaatataattataatctttttcactaaagtgctatgcttcgtactgacacacataacacaatacatagcaaccaaacattacctatcgtgtcatataatcttgcattcgatcttgcaacgctgtaaatgtttcaaagccatcttcttctaagaagtgccctccatcttccacgattcgcaagttcccctctaatgcattcattaaccgttgtgtctctttatatgaaacgtatttatcatttttagaactcaatccataaaaatgatcgactttcttcttaatgttatcgtagtcaattgtcacattacttaagtcgatatctaaatcaatcttttcagcatcttctttaaaacctgcaatactaaaaaagccttctatcggctgatcaatcatttcaatatattttaaagctgtaattgaacctaaaccatgcgttacaaaatatgtatctttctttcgaacgttaatttgtttcgtcatagcctcaatccactgatccactgtcttcgtttcaggtgattcaaaattaaataatgttacatggtacccttctaaagtcaaattatgttttagccactgataccagtgatttctactatttccatgcatagaatgtacaatgattacatctgtcatcacattctctcctttcaacttactatttctttctcattttaaaaattgaatactcatctataattgtaaaataaaagcaccttaaatagaaatgtttatatctcaaagtgacatttcatattaaagtgctttgtcatcttttctatcaaatttagaaaccaatattactatgcgtatatattctttataacaattccaatattatcgaatttccatccattaaaaaatataaaagatacttcactggcgccccagtccacaattaacttacaactctgcgattacttcttcagcagcaactttaccttgtgtaatacaatcaggtagtccaaccgcttcaaaagatgcaccagttactctaagtcgtggatatgtttgtttaatatgtgcttgaatctgcctaatttgttgaatgtgaccaacatggtactgtggcatacttttcggcaaacgattgacaattgtaaattcaggatcacctttaaatgtcatcatttgacttaaatctctacgtacaatcgatactaattcattatctgtatgatcatcaaccacagtatcacctggtttacctacatacgcacgaatcaatgctttaccttccggtgtagtaaatggccattttttcgatgtccaagtacatgcggtaatgtctgtatcactcgttctcgcaatcacgaagccagtaccatcataagtgttttcaatgtctttttcatcaaatgccaatacaacagttgcaacagtcgtactatccatcgttttaaagtaatcaaatgctggatcttgcccgaaccaattcaaaaagacttgatgaggtgttgtcactaatattccatcgaatacatcttctagttgattactgtatacaattttatattgcttttgagatgtaataatatcatccactgacgtattgtagcgtattgtcacacctttatttttcacatcttgttctaatgcttcaataaatgaacttaaaccatgcttaaattgtttgaattgtccttttggtgcgccaggatataattgtctttgtttcagacgcttatttttctcatccttcataccttttatcagacttccgaatgcctcttccttttctttaaaattaggaaacgtactcatcaaacttaatttatcaatatccgtaccataaataccacccattaaaggctcaattaaattctcaagtacctcattacctaatcttgctctgaaaaatgcaccaacagaaatgtcaccatcccgcatttgagtaggttttttaagtaaatctaaccctgctcttaactttccaagtggtgaaattaatttagttgtcacaaacggtttgatatctgtcggaattcccataattgatccacctggaataggatacaatttgtttttcgcaaaaatataagattgtccagtcttatttgtaacaatatcttgttctaatccaatatctttcgctaattctgtcatgatcgtttttctacctaaataagattcaggccctagttcaatcatataaccatctttacgatacgattgaatctttccccccggacgattcgatgcttcaaagatggttacatcaatattaggatcttgctgttttaaaaaatatgcacttgataaacctgttatccccgctcctataatagccactgatttagtcacaacgtttcacgcttctttcgtcattaaaatatagacttgatttcatcaacaattgcaccgataaataatggatgtgtattcggcatttttggacgataataattcgcgccaatatcatcgcaaacaactttacattcataatcattgtcataaagcacctctaaatgctcacatacaaaacctactggcgtatatataaagtttttatactgatgtttttcatataaatcacgtgttaaatcttgtacatctggccctaaccaaggtgtacctgtattaccttcagattgccaaccaatcgcgatatgttcaatattagattgttctttaattaaaagcgcagtatgttctagttcttgtggatatggatcattattcttttcgattaatccttttggcaaactatgtgccgaaacaactaataccgtgtctttatgttcctcttccggtatttgagctaatgtttcgttgactttattcgtccaatattcaataaatttaggttgttcataataatgtttcacatgtgtaagttgaataccatattttgcagcttcttcatcagcacgtttgtcatatgatcctactgaaaatgaagaataatgtggtgctagtactacagtgattgcttcagtaataccatctttgtgcatttgttcaaccgcatcttcgataaatggcgaaatatgttttaatcctaagtatagtttaaattcaacatctgcatatgctttatttaatgctgaaactagcgcatcagcctggtcatctgttgtacctgctaatggtgataaaccacctataaattcatatctatctttcaaatcttgaagttcttcttcagatggacgtttaccatgtctaatatctgtataatatggctctatgtcactttctttataaggtgtgccataagccataactaataatcccatttttttagtcattgataataccttcctttaaatgaattatctttcatgtcttcaatgtaatactatgattatctttgtgtatatgtgtgtacgaattcacttactttacgtaacgtctctggttgcacttctgggaaaacaccgtgtcctaaattaaagatgtgtttaccgttctccataccttgatctaatattggtttcaatctctcttcaatgacattccatggtgctaataaaattgatggatctaaattcccttgtaatgttttagtaacgcctaattgttgagcctgattaatagacgttctccaatctagacctaatacatcaatcggcaaatcattccattcattgattaagtgactggcacctacaccgaataaaaataccggcacatcatgtttttctttaacctcactgattaatcgaatcatatgcggtttaatgtaacgtctgtaatcctcgacatttaatgcacctacccatgaatcgaaaatttgaatcaattcggcacctgcttcgacttgagctgttacatatttaacagatacatcaactaaatgattcattaaagcaaaccatgttgcttcatctctatacatcatcgcttttgtaaaattgtaattttttgatggtccgccttcaatcatatatgacgctaatgtaaatggtgccccagtaaatcctattagcggtacatttaacttttcttctgttaaaagtttaattgtatctaatacatatggtacatctcgttcggggtctatttgagaaagtttctcaacatcttgaattgttttgataggattatgaatcactggaccaatacccgatttaatttctacatcgacaccaattggctttaatggtgtcataatatctttgtataaaattgctgcatctgtatgataattatcaactggtaaatgtgttacataagcgcacaactccggctgatgtgtaatatcgaatagtgaatatttttctttcaattttcgatattctggttgcgaacggccagcttgtcgcataaaccaaacaggtgtatgtgtcgtttcttcacctttaatcattttcaaaattgtattgtttttattatgcaccataaaggcctcctaaattaaaatcattcttatctatattatcatatcgctcattcgttcgtattttcaataaataaatgtcataaaactgacattaaattacacatcatttgtttgtgtatttaaattttaaaatcttgatggattatctccacatctttttgtcttgcatgatttattatagtaactttaaccgtatattaatagtggtaatgactagtttatcgtcgtataataaataaaaacataagggggacctttcatatgaagaaattatatacatcttatggcacatatggatttttaaatcagataaaaatcaataatccatctcatcatttattccaattttcaactgctgattcatcggtgatttttgaagagactgaagaaaatactgtactgaaatcaccttcaatatatgaagttattaaagaaataggcgcattcaatgaagatcatttttattgcgcaatttttattccgtcaactgaagaccatgtttatcaacttgaaaagaaattaatcagtgttgatgacaatttcaaaaactttggtggctttaaaagttatcgattgctgagacctgttaaaggtacaacatacaaaatttactttggctttgctgatcgacaaacttatgaagactttaaaaattctgatgcttttaaagatcatttttcaaaagaagcattaagtcattactttggttcaagcggacaacattcaagttattttgaaagatatttatacccaataaaagaatagattcgaagaaaacttccattggttatgctgttaacgtatagatgctaatgtaatgttgaacgccgtttcatttggcgttcaacattacatgcacctttgcaacatacatgccaatggaagttttttaatctcgtaataatgtttcctgatattttaactttttaattatacttctaatcgttaataaacctacaatatagaaaatgagtacaacatagaataacgtcatatgttttataataaatgtcactgcaaacacggtacaaataacaaacattaatctatataaaaactgttcataccctttgattaccttctcttcaggtacgggccatacttgaggccataagccatatgcttgctgtgaataaaattgtgccatttgtaacaatataatatatacaaataaacacccaataattgctgtcactaatggatatgataaccaaaccataagtaaaactgcaataattactaacctaaagataatattaaatgcgtctctccctcttataaagcttctaataaataagaataaatacatcgcattagagttaaatttattaccctttggaactggtaaaagtatatctagataacttcttctgactgcagattctttcaaatgtttcacatcggtaaacatattaacaaatttataataattcatatgatgtcgatgttcgattgcaatcattttctcccaaggatacaaaaagccaggtttatattttttaactaaaaattctattaacacaggcaaagcaaccatcacaagcgcaatgtaccattttggagctaacagtaaataatatgttagagcaaagatgatgaatgatattaaattaacttgccatgttttaagtcccgactgataccattgccatcttaagcgtaaaccaacatatggaaaaattaatgcactgactccaaaacaaatataaaatgccacattatgttgattaatattgtaaaacaacgggaacattataataacaataatgagttggattaaaatgcgcgcaaagtaactatataaaatcgcatgacgcataaattgagacatgtgtttttcaaatggtaataaaaagattttatccgcttcttttaggagtggtcgcattggaaaaatggatgtcaacgcaacaatcactgctgctattaatgcaaaattgatattcgttggaatatgttttaaccattcaccatatccaaaaataaatgcacccagcaaaataagtaaaaataccatgaaatgaccattaaatataaacttattataataatttttctctttacgaagggcatgtaatcttttattaaataatgtggtcgcttggttacgcatgtacatctccaccttgcgtcacatgaatatatatatcgtctaacgtttgattatgtaagccagtttgttgtctcaatgcttctaaatctccaaatgcaacgacttcaccttcgtctagtatgataaaacgatcacaataacgttcagctgttgctaaaatatgtgtactcattagaacggttctaccttcgtttttcttttcaaccattaaatctaacatggattgaattcctaatggatctaagccaagaaatggttcgtctataatatacaattcgggattaacgataaacgcacaaataatcatgactttttgtttcatccccttagaaaaatgactcggaaaaactttcaattcattttctaaacggaatgtctttaataatggcattgctcgattcatcgcttcatcacgatcaatatcatatgccattgctgtcatctcaatgtgttcttctaatgtgagttcttcgtatataaccggtgattccggaatataagataactttcttctataagcctctatgtcatcattaatgttgatatctgaaattgatagagatccttccataggtgtaagcaatcctagcatatgtttaatcgttgtactcttaccagcaccatttaggccaataagtccaacaatttcgcctttgtttaattcaaaatttatatctttaattacagggcgttttccatatccacctgtaagctgttctactttaactgtcataaggcacctccatgacatatattgtaccaaaaattataaaatgctcatattaaatacacatgtcctaatatcgaatttttaacgacaatgttataatgaatggtaatacaagttgaaaaggagtgtagtcatcatgtcagaaacaattttcggcaaaattttaactggagaaattcctagctttaaagtatatgaagacgattatgtctatgcctttttagatatatcacaagttactaaaggacatacgttattaattcctaaaaaagcttctgctaatatctttgaaactgatgaagaaacaatgaaacatatcggtgcagcattacctaaagtagcaaatgctattaagcgtgcatttaatcctgatggtttaaacattattcaaaataatggtgagtttgcagatcaatctgtatttcatattcatttccacttaattcctcgatatgaaaatgatattgatggatttggttataagtgggaaacacatgaagatattttaaataacgatgcaaaacaacaaattgctgaacaaattcaagcacaattttaaatgtatgcttaatctaagctcgaacgggtataatatgattaatattataacaattgcgtttgaagtgataacatcaaggttagcaattttaaacaaaatgagttatcaagataacagatgttaaaagtgaggagaatataaatgaaagcatcacgcattctattcggtatcggtgttggcgtagcagctggttttgtagttgcactccaaggacgagacgacaaaagtgtcaagaacaacacgatcgatcgtactgcccctactggttcaaaatcagaactacaacgtgaatttgaaacgattaaacaaagttttaatgacattttaaactatggtgttcaaattaaaaacgaaagtgcggaatttggtagttcaatcggtggcgaaattaagtcattacttggaaacttcaaatctgacatcaatcctaatattgaacgtttacagtcacacatcgaaaatttacaaaatcgtggcgaggatattggaaacgaaatttctaaataaaacggtacgctctcgatcacaactatttttattagtaacagcatatttattttttaaattaaatgccaaataaaagagatgacattagaaattagatatttcttgtcatctcttttttaaaactcaaatgaacttatttttacaaattacaggaatacattgtttgtagtgatttttgcttaaatcatatttatgaattgattgaaaacattgcttaggattcattgtgttatcctttcactttgattacgctttacttaaatcattatcgacaaacaacatacttatattttcattgagccgaaccttatatacacattacgtataccttacttgcacaaattattaatctggtgtttattataattacatatcactatatttttagcatttgtataacttacttggtcaaaagatgcttttgcatatgccctgccatatccattttttatattattcaagttttcaaatactcatgtcacacgcgcctttttcacaagtgatgctttattagcaacaatatgtgttcacagaaatttgttctgcattctacttctacgctagtcaatcagccaattttaccaatccccactttcgcgtttcaaatcaaacaatacgtcgcctctttcttcatatataacaattcttctaacatgatatgttactattgaattactgaacctgagttagttataatctaacttatattgaaaagagatgaggcgtaagatatgtttttatgtaaaagacaaattgatatcaatgcacgatttggtttgcctagaattgcatttatgagtgcagttgcaaccatcattatgtttttagttagttatgaagtaatgtattttttatctaatacgccattatcagatagacattttctcatctttttattacttgtatttatgacgtatccattacataaaagtatacatttattatttttcttaccatatagaaaatcgtttaaagttcataagctaactaaaagaaaatggcttatattctataatacctacgtcaatcaacctgtacacaaattttatttttgcattaacttaatattgccgttaattatcttatctgcaatgttcgtttatctaacaattttattcccgcaatatggacattattttatgttcttattggcattgaatttcggtatttccattacagatttattatatttaaaaataattatattttctaattatggtcaatatatagaagaacatagtacaggtattaatattttgaaaaaaattaaaaatccatatcatttataacaaaataattatagcaaggtgttattatttgtttttaggctatgtaatagcttacaatcaaatgtatatagaccttgtttttttattttcatcaatttctacccctaaacctaatgctctagtctgatgtcatgggttattgattggtgataatataaaactatgttatattcacgatgattaacttacaaaggagtttcaactatgaagatgataaacaaattaatcgttccagtaacagctagtgctttattattaggcgcttgtggtgcgagtgccacagactctaaagaaaatacattaatttcttctaaagctggagatgtaacagttgcagatacaatgaaaaaaatcggtaaagatcaaattgcaaatgcatcatttactgaaatgttaaataaaattttagctgataaatataaaaataaagttaatgataagaagattgatgaacaaattgaaaaaatgcaaaagcaatacggcggtaaagataaatttgaaaaggcccttcaacagcaaggtttaacagccgataaatataaagaaaatttacgtactgctgcttatcataaagaattactatcagataaaattaaaatctctgattctgaaattaaagaagacagcaagaaagcttcacacattttaattaaagttaaatctaagaaaagcgacaaagaaggcttagatgataaagaagcgaaacaaaaagctgaagaaattcaaaaagaagtttcaaaagatccaagtaaatttggtgaaatcgctaaaaaagaatcaatggatactggttcagctaaaaaagatggcgaattaggttatgtccttaaaggacaaactgataaagattttgaaaaagcactatttaaacttaaagatggtgaagtatcagacgttgttaaatcaagctttggatatcatattattaaagctgataaaccaacagactttaacagtgaaaaacaaagcctgaaagaaaaattagtcgatcagaaagtacaaaaaaatccaaaattattaactgatgcatacaaagatctattaaaagaatacgatgttgactttaaagatcgtgatattaaatcagttgtcgaagataaaatcttaaaccctgaaaaacttaaacaaggtggcgcacaaggcggacaatccggcatgagccaataacacaaaaccgagcgaccgtggttcaaaaatcataccacgaccgctcggttttttcgcattaaaaatcggacagatgagctcatgtttcagtatactcatctgtccgatatcttttaattcttaatcgagtgattcaggattgtagaatctacgattttcaagaccaaatattttatctgtaaactgacccttgtcagtttttttataagccttttcaaacatattcattctagcatcgatattatcgatatagcataaaatttctgcttcttttaagtatggcagttttggcgaaccatactctaacttaccatgatgagataaaatcatatgtcttaacaacatgatttcttctccttcaatgttcaattcacgagctgcttcaactacttcatcactcgcaatcgagatgtgtcctaataagttaccttcgactgtatacgacgtcgcaacaggaccactcaattctctaactttaccaatatcatgcaaaataataccactatatagcaaacttttgtttaacaatggataaatgtcacaaattgattttgcaatacgtaacatcgttaatacatgatagcttaagccactcgcaaagttatgatgatgagaactagcagctggatatgtgtaaaatcgttcttgatattttttcaataaatgacgtgtgatacgttgtaaattagcattttcaatatctagcaaataatgagaaatctcttcttgtatttctgccggtgataaaggtgcaccatctacaaattgttctgtttttaattgatcttcagttgtcgctagtctaatttggttgactttcatctgtttatttccgcgatagtttatgatgtcacctttaacatgtacaatttcttcaggcttgattgttgccatatcattttttgtagccgtccaaaatttcgcttcaatttcaccacttttatcttgcaaatgtaatgtcatataatctttaccttgtgctgttacaccctgtgtagctttatgcactaagaaaaagtgatcaactgaatctccgggatttagattctctatatttctcatcgtttcccgccttcctctattttgtttaatgtaatcacttcttttgatggaacaatattatcttttacacatgtaaagtatagtacttgatagtgttctgataatgatcgtaaataattcaacattttttcagtacgttttttatcaaaatgaacaaatgcatcatcaacaattaatgggaacggataatatggtcgtagtaccttaattaaactgatacgtaaagctacataaagtaattcttttgtagattgacttagttcaacaggatcatataattgaccattaacatgtttaaccgtaattgattcttcattatagttaatcatcgtatatctgccatctgttaaatgcttcaatatttctactgcttcattaataacttgaggcaaacgtttatctttaatttgtttaatgtgttcatcaactaaactttgtaaataacttaaacttgcccaatctttagcgatatcattaagttgatttttaagactgtgatattcatgtcttaaattagcaagcgttgcatcagtttccatgtgattgatttgtgcacttaaatcactgacttgtgcttgcatttcaagatattgctcattatattcgtcaacttgagtagccaataaatgatcttcttcttcaagttgtgctgttgttttttcacttaaactagaacttaattcataagaatagttttggttctcaagatatttagttaaatcattaaaacgactcaaattactagtgtatgtttggtaatcttcatgatgttggtaaaaatcttcttcagtaccaacattgataaaatcgaataatcctgctatttctttattattttcgtctaattgtgcttttagatggttcaattcatttgtaacaagtttggtattttcagcattaatacgccatttttcattcgtgtcttcagctgatttcaaccattgttgcacatcgtggaataaagataatttgttgaaataaacaaattgtgattttgtaacagcttcagcatgattgtagaatgtatctaattcttgaaccaattgctggcgttgttgatttaaatcactgatatgttgatctaatgctttaatattcgccattgtagaaatactatcaacaattaaatcatttgaaattttagatgataagtataattcatccttaacgttttcaactgtcgattgcaattcatcatgacgcccttttgcatcatttaaacgaccttcaatatactgacgtttctcttctaaaatatctttatttttcaaagcttgttgccagtgatcacgaatgcgatattgctcatcaagatcaaaatctaagtcatagttttcatctaaaatggctagttgtgctttaatttcttcgatttcatctgtgatggcctcgctataatctacttcttttgatttagacatgatgataccgataacaaatactaaagttaatactgcgaaaataataccaaacaacatgttgtttgaaataaatgagaaagcagttaaaccaatacctactaatgttaaaagaataaacgttgttcgtaacaatttttgacgtttttgtttttcttgttgctcaatttcgaaacgttctttcaatttgctatacaagttctctttttcgtttaattcaatgacttgttgtgagtattcttttttcttttcaaaagtctcttcaggaactattttttcttcaacagaatctagttcgctatgaaccgcattatcttcgattttattttcttctaaactacgttctaattgcttaatgtatgccgcttgttcttgtttattcttgatttgctcactgacataacttttcattgcctcagagctatctacgtcatgatgcgtttcagaccaaccaatatttgcttgcaattcatctttatcacgttgtttattcgcaatatccttttcgattgcagtaagttcaaattctttatttttaatttcattttcttgttgattcaaactaatgaaggcgtcaatatcagattgtttaactggctctaattgagtcgcttcttctttaagttgggctaaacgctcatttcttaaaccaatatctctttctaacgattgcttatgcgctcgtgctttttcgtaacgatccacacctttttctgggaatgtgattggctcaatatttaactgttgttctagagacttccattcttgtgaatgatcatgtaatgcaacctctttttgtttttcttcatgcatttttgataattgatttaaattatgctttaaattctctaatcgacgtgatgatttatctcgatcatctactaagcgatgatatgtttctagtttagcttcttcttcacgaatttgactttctagttgttttaattgctcaatttgttgattaatgatcggatttttacctgattttttatataattcatcttttttacgattaatcacttcgcgcattgacgtgaattcagttgatcctaaagcccctgcttgtaataaataatcttgcaattgtttttcatttagatttctatggatgtcttgaagccctagtacatcaaatgaaaagataccttgatatgtctttttagaaatataattaagtttcttttgtaaccaagcatcatcacgcacagcaccattaggtaaataaactttcacatcaccttgtgcactgcccttaattcgttcaacttcaatttctaagccatcatcaagaataagtactaatttaccaccgtattggttacctagacgtggttctagtcttggctctttagactttttagttggaaaaccaaataatatcgaatggatgaatgcttgaatcgtcgatttacccgcttcattttcaccaaaaatttcagtgaagtttttattaaattcaattttacgttgaacaaattgaccataaccataaatttcaagtgatttaattatcattttgttcacctctcatttcagcttttaatatttcttcagcacgattaactaatgctgtatggtcgaatgttccataatcgtctaggaacttagatgcccttggatttaaatataagtctgacatcgctttatcaaaaacagtttgatcgactaataattccgctgaaaattcattaactaaaggtgactcatcattttgtgcatattgtatttttaactcatcaatatatacaaattgattttcgttttcttcataatctgtaatcatttcttcaacttgtaataaatcttgaggtgaaattaatgtctcactattaataacaagcgttaaacgataaaaggcttttccttcttctctcacttgttctttaaagttttgaatgacctcgtataaaccttgcttagatgtcttatccgtttcaatagttgcttcttcaaatctaatatactgtgtaggataaaatttagtttttaattttaagtggtcaccctcgattaataagcaacctttttcaccttgctcattaaaatgtctaccttgaatattacctgaatagttaattacaggcatatcacttaattgttgacgttcatgtatatgacctaaagcccaataatgatacaatttactgtttaaatcttctaaaatgaactcggtatatctttcgttaactgaagacttactatacgtaccatgcaagacaccaatatgtatgcctttttggccttgacttgacggatattcatcaatcttgttctcataacttgctctattttcataactaaatccgtgaatataaattgtttcaccagatttagtaattgcttcatacgtctcaactttatttgaaaatacagaaacattatctggccagtttgatgaaatctttgaagataatgggtcgtgattaccatgacaaacataaacgaatatttgttcattttgtaaacgttcaaattgctgttttaagaaaatttcagcacgtaatgttctgttttcactatcaaataaatcacccgcgataattacaaaatcaacatcttgttgtaatgcaatatctacaatgtttttaaaactttcataagcacttttttgaacatcctcaaaaattttagggcttatatgactcttagatttgaaaggactatctaaatgtaaatccgaacaatgaataaatttaaccatacatccatatctccttaattaaaggttctaacatcaattttgcaaaatccaactatacaaagcattctaatcactatattcatacttataggtgtagtgattcattagctgatttattaaaaccagtcgccatttttatttttatttcgttaaaaaattattatctacacaataataaagtgctttagtcaaatcgtgatgttttatttattaacaagtttattatttcttcattttaccataatacgcttcatatcgtcgatgaacatatgaaattgagacacatttataacagtttaaaattttatttgttacgtacgttgatatttttcaaaaatttcagtcggaaatgcaatttccgtagttgttaacaccgcaagtgaaccaactgccacattaaagatttacataattattctactagttctgctcggcagtaatcaccaattagaagctaaatgtcaaaactatcattgcacttaatacgccaaacattttcaggccgttcttaatgagtcattaaaagtgaaacacttttccatcagtccgatacatggccgaactaataatattatgttgaaaactttacactccaaaatgcaaaaaggaagttaggacatgtttactagcctaacttccggtactgaacgcatttacccaatttgacagagagcctctaacttccgttatcaagctcatccgcccgttttggcatagagccaatattgtttgattgcccagcttccgtcgcccgttctgagctaaagctagccacgtttactaacctaacttccgatactaaacgcatttgcccaatttggcagagagcctctaacttccgttatcaaaactaaaaaaaactacccacaaagtctcggactctgtcggtagtctattcctctatttaaaggattgaaaaatattattttaatattagtcagcgtaaatttcgtctaatggtttaacgataatttggttgatttcttggaatacttgactcattttttgttcagcattcattaatgcagagatgttttcatctttttcaattgcttgcgcttgttcttgcgctttttgtaaatcttcttcagcaatttcttcaccttgcatttgtttttgttggaagttaatttgagtttcacggaactcgtcgaataactttttagattcttcgttagcttttacattagcgaatgcttctttgattgctttgtattcttcgctttctcttaaagcttgttctaattgatttgcataatcatataaatttactgccatggttatagcactcctttgttgtgatgtttattaaaacgttcgatattactttaccacatctcgcttttttagacaaagattgcaaccaaaccttggaaaaatccaataataccacctaaaatgaaacctaatgacataatcaactttagttctttgttagcaatttctataattaatttttcaatataatctaagtcaaacgtattaatttgttcttcaattaatcctcgtaaatccacttttttcataattgtagataagtgaatcgataattgttcaacgattaaatttggtaatttgctagagagttgaccttctaaataatcaacgaattgaggcattaacgtaaccactggcttattcgcttgtttgcttgcatttgttgttacatacactgatagattttcagcgatttcattaaactgcgacgcatctaacagttcattcaatggtttatctttaaaagtttgatattcattggtaattaacgatgtcacaattgttcttgctttagggtgagatgttaaacgtataagttcttgttgaattcgatctgcaatgctctcttttgtcataaacatttgcaacataccaattaacttacctttctcgttgaaaaaagtatccaacatatcattaatatcttgagtgccttttgcagatgataaataatttcttgcacgatcacataataagtctgttgcgttatctacatgctgatctaaaaatgctacaagttgatttggcaataaagatgctattgtttggttttgatgctttgtataataattattcaattgtgatgcaatatattgatttccattagtttgtaatacttgttcaaaatcaatatcgatttgagaagtaatttgcttaattgacaattgatctttcgtcaacttttgtaactgttgttgaatcatagattctattgcttgctgtgattgctcgctttttaatttttcattaattaaagtttctataagcaaatgctcttcaatcacttggccaattttagttgcaatttcttcgcgtcttttcggtattaaacctggtgtaaatgggactctaaatttaaatatataatatggtttaaagggatgaaacagcattctaattgcaattacattagtaataccaccaattatcgcccctactacaatcataaatatgataataaatagtgcattcataattttgactcctttgtgacaacatagttattcattataccactatttttattttttaattcattaatcatttcactttctacccaatttattattagtttacatacaaaaagcgatgcctcacctctcgaaacaggtgtgttacatcgcttttattatttattaaaagtatataggcctagatatgtactaattcttctttagcatttctgttaaagtatgtttcagcttctctcattttagaagtaccgaaaattggttggttatctggatttaatacacgataaatattgcttactttgttactttgtaaaatgtacccattacgagtctcaatgttattccaataaatatcacttgttggtgcatggtttggatatgcacagtgatttctagaaattgtttgaacgatttctaatggatcacagccaaatgtactgtttaatacttcagagtctctgaataatgcacaaattgaaatacaagttgtccagtttggtaatactctctctttttcgatttgtactaaagtctttttagaaagtccaattgtttgcgccatagtatcttgcgtataaccagcctctatacgaaccattttaaattttgtttgaattaaatctgtaaaactctgtctatccattctgttatctacctttctgtttggggaattttatccggacacaagaaattgcaataatacacatttcttgaaacacagattacatcttaatatatttttaataaaatgaaaagagtcaatttcacatttgtattaaattttgatcaagtcaacaaaagttaagtttactttataatgaagcaaaagtaaatgaagttaaattttatgcacaatcactagatttgataaaacttacacttttataatgatatcaaatttacaaagaaaactgtataataattcctatcgctgtgaaaaaaatctaaataaatcgattaaaaattgtcgattttttgacgaagctacatcaacgcaactttaaatcaacttattttccattgcataaattgctgcttgtgtacgatcgctaacttgtaatttactaaatatatgactgacatgtgttttaattgttttttcagatacaaataaagtttctgcaatctctttatttgttttacctttaaccatttcacgtaacacttcaatttctctctttgacaacttattcgtgtagtgtggtttttgactaactgtttcgattacatcttgtgcttttggatgtatcattttttcgtcgttcatgacacgcctaattgtttcaattaattgctgaggctcaacgtctttcatttcataaccatcagcacctttattgattgctgatattacatgttcatcatcaacgtaacttgttaatactaatactttaatttccggataatgcgccttaatatattccgtaatttcaataccattcatgccaggcatcactaaatctaatagcacaatatcagggtgctcatgctcttttaaatattctaaaaatgtttctccatctgcaaagtcttgtaaaacttctatgttttcaatcgtggataataaaaatcgcaatccttgtcgcacaatataatggtcatctactaatattactttgttcatgggttatctccttaaatcaagctattttataggaattgtgaattgtatttgtgtaccctttgttggctgagaatgaaaggtcactttacctcttaataatttaactctttgttttatgttatttataccgtgtgatgaagctatctgaacattatcgatctcaaatccttgaccataatcaatcacgtcaatatatagtatatcgttcatttgttttaatgtaagatccattttattcgtatcagcatgtttcttaacattattaatacactcttgtaatgctctgtatatgttttcttcgatttcattagataaatcgattaaaccttctacatttacatttaattgtatatgcattaatttactatatgctgtcaaagcatgaattaaaccttgctcaagtccaactggcttaagttgccaaatcaatgcacgcatttcattaacggcattttgactcgtttcttcaatcgtcttgaatgcttgtttagcgatggattcatttgacataccatatgcagcatgcgctgtaagtttgacggaaaataacatttgatttactgaatcatgtaaatctctagctaagcgattacgttcattaatttttgctgcttctttttcacggtctgttaaataaatacgtttgatggctgaccctaattgaaatgcgacagactctagcaactctaaatcttcatcactatatatttcagtatttggtgacgctacatttaaaatgccgaattgttcttgacccgatttaagtggtaccgttgcatgatgtgtaatattgtcattttggctaggaaatgctttagaggctaagttaatacgagaacaattgacgatattcgacgctttcattagcctacgttgattaaatgctttcacacaccaacaagacccatctttaatgtagtgacagtggtctgctgtcaaagattgtggtaaagccacatgtgatacaagttcatgttcacctacgctattgatgaaaaatatccagcctgtcgtgaaattactgccctcaattaaatattttaacgcaccttgggtcatgctatacatttcagtttcttcgtttaaaaattcggcaatctcttttaataaagctagtcgcgtcctttgttccatcaaatcgctccaattcatttttacgtgtattaactattatacattgagttattatatttttaaatcttagacgtgaacatgataaaatggccttgattacttaatagttatatttcggagaactgatttgtgatatgatattaaagactataggaggattttatgaaatttaaaataccagaaaactttaatgacttaagtttacgagatattttccaacaacttaaggtacctaaaaaagatttacatcatttaaatatgtctaaagatattactattaatgataaacctgcgcgattaatggataaagtgcatactggcgacgatgtatttgttccaaccatcgatgaaaaaagtaattatgttccaagttatcgttatgcacaaattaaatacgaagacgatgatatggcaattgtaatgaaacctaaaggtgttaagacccaccctaatgatttaaaagaaagcaatactttaatgaatcatgtgatttacactattgatagtgactatgtcgaaccaattcatcgactggaccaggaaacagtaggattattaattgttgctaaaaatcctttaatgaaaaaaattcttgatcgcatgttagaagacaatgatattacgcggatatacaaagcaaatgttaaggcacttttacctttaaaaccacaaacgattgatatgccaattggtaaagataaattccattcgaataaacgacgtgtgtctcctactggacagcgtgcaattacacacattttaacttcaaaaatgataaaagaaactgtgtgtcaacttgaaatcaagttggatactggacgtactcatcaaattcgtgtgcatttagctgaaattggtcatccagttattggtgatcctttatacggtgattcaacgttaagacaattagaacttgaaagttacaaaatagagtttgtgcatcccttgactaaggaagtcatttccgtttctttggatgactaatttgtttagtttggcatgatatttaaacatgcaataccgcattgtaactaaatcaagtatcaacttaaatcgaatagatggaaaattattaattttttcagatgttcggtttttttatgttttttacgatgcttaggattttatattttgaatgtatttggatttatagcatccttggataatgacttgtagtctttttcaactgcgttacgtgtatctaaggacaatacatgacatcataagatttttatcacatattgtttggtcaatacatgtacaacaattcatcatataaaaaataggttctataataacatggaatccatgaaaagtttttcctttcatggctccatatcaaatcggacttataagttcaatttgacatagacaaaaaaataaagcttgaacactacatctacctgtaatgcccaaactttattttatattaatatttaattaatgaggatctaccatatcttctggtttaatccatgcttcaaattgttcttctgtaacatatccagtttgaattgcagattcttttaaagttaaactttctttatgggcttttttagcaatttgagcagctttttcataaccaatatgtggatttaatgcagtaactaacattaatgattgatttaaataattatcaatattctcttcgattggttcaatacccactgcacaattgttattaaatgtttccataccgtcagctaaaaggtaaattgattgtagtgtattatgcataataactggtttataaacattcaattcaaagttaccttgtgaacttgcgaagccaacaactgtatcattacccattacttggactgcaaccattgttaacatttcacattgtgtaggattaactttaccaggcataattgatgaacctggttcattttcagggatagaaatttctgccaaaccagctcgtggccctgaagccaaccatctcacatcattagcaattttcattaagtctcctgctagcgccttcaatgttccgtgcaattgaacaacttcatcatgcgctgtaagtgcatggaatttattttcagaagatacaaatggataacccgtattttcagaaatatactgtgccactttgtcaccaaattcaggatgcgcattaataccagtaccaacagccgtaccaccgatggcaagatttaaaatgtgcttcttagattcagataacattgtttcgcaacggtcaagcatataacgccagccactaatctcttgtcctagtttgatcggcgttgcatcttgtaaatgtgtacgaccaattttaataattgaatcaaatttatcttctttttctttcaaagtatttcttaaaagttttaatgcaggttctaattttgtttcaacctcttgatataatgcaacgtgcatagcagttgggaatgtatcattcgaactttgtgatttatttacatcatcatttgggtggatactttcatcactttgatgatcttttaaatacatattagcaacataacttactacttcgttcacattcatattactttgtgtaccgcttcctgtttgccatacaactagtgggaagtgttcatctaattcacctgataaaatttgatcacatgcgtatacaatggcatctttctttgcctcgcttaattttcctaaatcaaaattagctaatgctgctgcacgctttagttgtgcaaaaccataaactacttcgattggcatacgctctttaccaactgggaaattgcgtttacttctttctgtttgagcaccccaatatttatctgcaggtacttctatttctccaaaagtatcatgttcaattcttactgacattcaatttctccccttatcactgtttatttaactgtagtatatcactaaacaatttatttgagcaatttatgattaaaacgttttcataatttgaaataaaaatacactaatcgcacgtgctcaccctttattacagtgatacggtcatacgattagtgtgttatctatcattatttagttattgttgaactaagtttaattacgatactttgttttagtagcttcaaccgtagcaatagctgtaagtatatataatacagcactaacaattgtcgtatatggatttagagcaacaagcgtacctaatactcctgttaaactcgcataaaacccatcaagtgtataatacaatattcctgttattaataaacaacaaattacacttattacaatacctgattgattacttttaatgaatgtttgcgcattaacatcatcgattaatccttttgataaattgagttgtaattttattactttgaaaataataggtaaatataatgccccaattgccaatggaaaagctttaattgatattaaacttataataactgttgctatcaataattgaatccagtattttcctaacataaatatataaatctcctctaatttcattcttcaatagcatatcataatcttggcatattaagaaacgcggtttaatgatttcattaaaaatattaatgatagatgacttctttcgataatgtctggggtaattaattatcaattccgtttaaatggtgttttaaaatttaaaattgaatttttgatatattactatgtctggtacacaaatcaatgttctttgctctacaaagctatattggaagtagttgactgcgggctccaacattgaagcttcggtatgtcagcttactatttcatgcaagttagcggggcccaacatagtaaatttggatcctcaatttctacagacgatgcaagttggcggggctccaacacagaaactggcggaaagtcagctttcaataacgtgcaagttggcggggccccaacatagtgaaattggatcctcaatttctacagacaatgcaagttggggaaacgagcccaacatagtgaaatcggatttccaatttctacagacgatgcaagttggggaaacgggcccaacatagtgaaattggatcctcagtttctactgacattgcaagttggggggccaaacacagaagctggcggaaaatcagcttctatgaatataataaaaaagctaggtaacaaaatgctacctaacttcatattcaagattatcaaacctatttgatataggttctatactatacattgtttacatgataaatagctgaatattacacaattataatactttactgactctcttcttcagaattcttttcttgatcattttgatcagaaatttgttccatttctttacctaattcttttaaatcttcaaaatcagttaccatactgttttcttcttcatgataatttaattttggatctttgtctttagacataatcaatacctcacagatttttaattaagcaaagcgtgacgtaaagtaagctttaacatcttcaggtaaacctgcagccgcttctttatcaagaataacatttaccattctatgtgcttttaaatcggctggttcgaagcttgttttaccattttcttgatataatttttcaactacatctcgtttattagcaccagtcactactaagaaaatttctcttgcttccattagtccttgacgaatactaacatttaacttaccttgctcatcgatagaaacaacttgtaatgttaatttccctttgttttctttagttttaatcttatcagcgattaattcgattgcatctttttcataagcaattggataaacttgacctgctggtacacctaacgcttcgaaatatgattttttatcgtcataatctaaaatatttatttggctaaaatcaacagcatgtttttctacatttttctttaattcatctagtactggcgcttgatctgtatctaaatgaaaacctgcaattgtagtaggattattgttaaattgctttctaataatatcagcagcatattctgctacaagttgactattgtcaaagactttaaagttcattgccatgatttctacactcctcttagtttgcattttacataaaaacggcgatattaataattattataccctaactttcaatatatcaaaccatttaactttaacatgcttatactctaaatatagcacttaagcatcatttttataatgaaaatgagtaaattttaattcaatcctggaaaatcttgttgacgtaacgcttcataaattaacaacgcagcagtatttgataaatttaatgaacgaatatgttcactcataggaattcttaacgctgtgtcttgatatttctctttcacccagtctggtaatcctgtcgtttcttttccaaaaatgaagtaaaaatctttgtcatgatttgaaaaatcaaaatcactataagtctttttaccaaattttgttaataagtaatactcgccatttgtggcttcaaaaaatgcttcaatactatcatgatacgtaatattcacaaattcccaataatctaaaccggctctttttaacattttatcatcagttctaaatccaagaggtttaattaaatgtaaatgtgtgtttgtacctgcacacgtacgtgcaatgttaccagtattagctgggatttctggttgatataaaacgatatgatttgtcatattactattctctccttgtgtctaatccttttatcatttcattctgaactgctgcatcctcttgatcataattagcattgataaaatctcttgcttcttccccaagaatttgaccaatagcccaataagcagttgctcgaatcatcggtctttcatctgttattgcaacttttttcaattctggaattgcatccacttcattaaaatgcgccaatgctaaaatagcatttcgttgtatcggctttttaccacgccaagcacctgcaaggtgaccatatgtttgtttgaattctttattagacatacgtagtaaaggtactaatcttggctttaaaatttctggttccaaaatgatgtcatcttgttcggtattaatacctctatttttcgggcaaacttgttgacacgtatcgcaaccatataatctattcccaattttataacgatattggtcaggcatatagccttttgtttgcgttaaaaaactaatgcatttctgactatttaattggccatttccaactaatgcacttgttggacaacgatcaacacaaattgtacaatcaccacagctatctaataatggatcatcaggttcaaaaggtatactgactaacatttcaccgaggtatgtccatgttcctagtttagggttgatgacaaagccattacgaccaacaaagcctaaacctgcacgttctgctactgccctatctgataatacacccgtatctaccatagatttgatttcaacatctggaactttagattcaataaatgcagctaacatgtctaatcgtttacgcataattgtatgataatcttgaccccaggatgctctagcaaataagcctctgcgatcacctctaacactcttaggtgcacctttcagtttgttaggataaccaactgcaattgctatgattgatcttgctgttggtaaggataatttaggctccgtccgtaaagtaatatcagattcttcaaatcctgaggcataaccatttgcatgataagcttcaagcttttgcttcaattcatcaaagggatcggcagtagtaaatccaatactgtcgataccaattgtatatgcatagtctatgatatcttgctttaactgcttggtatccaatcgtatgccccccataaaataatactatgttattttaacacaaccattattcatattgaggtttcatttcacataattttaataataaaaagcttgaatatatgatataactttgtggtgcgcatcatatattcaagcttcgttaggttgttataatactcttgctaagaaattttgtgttctttcatgttgcggttgttcaaatatttcgactggtgtgcctgactctacgacaacgccatctgccataaatatgactttgtcacttacatctttggcaaatcccatttcatgtgtcacaaccaccatggtcataccttctttggctaggtctttcattacttttaatacatcaccaactacctcaggatctaatgctgaagttggttcatcgaataaaataacatctggatgcattgctaaagctcttgcaattgctaccctttgtttttgaccacctgataattgattcggatatacatctgctttttcttttaatcccactttatctaataacgacaatgcttccttatgtaattcatcgttattatctttctttaataatttaggagctaaaataatattatcgacaacttttttatgtggaaataggttgaagttttgaaataccatacccattttttgacgtagtttatctacttgtgtccctttttccgttaagtcattgccttcaaaaatcacttgacctttagtgggtacttctaataaattcatacatcttaacaatgtacttttaccactaccagatggacctattattgctactacttccccttgattgatttcaagattgatatcttttaaaacttcattatctccaaaaactttattaagattgtttattttaatcactggcattcaatctcccttcaatcatgttcataatgcgtgtaagtacaaatgttaagacaaagtataatgctgctgccactagtaatggtgtgaatgggtcaaatgaaataccttgaaccacttgtgcattaaacataatttcgccaacaccaattgttgacacaatagatgattctttaattaaagtgacaaattcattacctaaagatggtaaaatgtttttaattgcttgtggcataattacacttttcatcgtttgtctataattcaaacctagactacgtgcggcttccatttggcctttatcaacagcatttatacctgcacgaataatttcagcaatataagctgaagaattaataactaatgcaattgttccacaaacaagagctgaaatatctagtcctaatgcagcagttataccaaagaatacgataaatacttgaactaacattggtgttcctcttaatatttcgatatagatagaggcaatccatgaaataatttttattttacttaatttcattaacgcaacgaatgcacctaaaatagaacctaatgcaacaccgataagtgaaattaatattgtaatcttaattcctttcaagaaaaaactaccatatttagaaataaaaccactgtcatcattcatcgcatttgcagcattagtcatatatttatcgattaatcctttatctttaacctctttaatcgttttattaatttgtgacaataattttggcgaatcttttggcactgctatcactgtatctttttcttcttcattaaatttcacattggaaattcctaatttaggattttgttttaaatatgcttctgctacaggtttttcaacaacagcaccttcaacctttccacttttcagagctaatataacgtctggtaaacggcttaatgaagtaatagatgcattttcaatttcggtttgagcgattttttcttgttcagttcccttttgtgcccctacttttttattattaaagtctttgatatctttatattcactaactttatctttctttacaagcatgatatttttagtcatcatatatgaatctgaaaaatcaacttgcttcttacgttcaggcgttgaagtcataccggaaataataatatcaatttttccagttttaagagctcctaacaaactatcaaatgacatattgacgatttttaattttaaattattatctttcgcaatttttttagctaaatcaatatctacacctgcatactcagtcttaccattaactgtatgctcaaattccattggtgcataatctgcagaaagacccactctaagttcaccgcgttctttaatcttctcccatgtttgattttgttcagcatgtgctgtgggattgatatacaccatagcactgctaattaacaaccctaatactaatataaacctaattaaacacttcatttatacagccctccctaattaatattcataattatacatattaatacattttgatgcaatagtgttttataaatgtatttttatcaatataaagaaaagcttctttttaaaagactttatttaaaaaatcgcctaatatacgcgaacaattcttacattttaaaatcaatcaaaaaaagcgctactatcaatatcttattgacagtaacgcctatatttatcatatattaaaacttattcttgtcatcaagctataaattattgttttggaacttcaaatttataaatatcattagaatatataggaataaattttttacacaattcatgaacaataaacgccgatacaaatggtatgacaaaataaccaagcgctaataaaataatattcattgttggatcacctgacattcggttaaatgcatttattgggccaactaatcctgtatatccaaatccagcagacaatggtgttcctttaacctgaagaacgtaagcaatgattccagtaattattccatttatagtcaatggtatcgaaataattaaatttttcaagtaaactgggatcatcatttttgcagctcctatgagtaaaactgcatttacaccaatagaattgacacgcaatgagccaaataagaaagtaacacaggcagccactatacctaggtttgctgctccacttcctagcccgtttaaactaatcgcagttgcaatcgctactaacgatattggtgttaccattaataatgaaaatgccacactaataagtatagacattaacaacggatttaagtctgtaaaagaatgaattacatttccaattgcttgagtaatttttcgaatgtaaggtaatgtgattagaccgatacccccactaacgataggtactaaaactggtaatataattaattcaaaagatccaagtttgttttgtaataccatatatataagacatgcaataataacaaccaaacttgtatttataatgtcacctataccttttaacataaaactgttattgctatatacaacagcacctgaaccaatcatagctgatgtacctactatagcagcacctgcgccattaaatttaaattgatgagcagctaaaaccccaataataaatgccataaatgattgaattagtatcactaactgatacgttaattctaaaatttcattaccacttttaaatatttttaatatttcacctaataaagcattcggaacaagtgcaataacaacaccagcaccaatagaatttaaaatcttactgaaaaactgtttattatcagcattctttgcgttactcataaacgacctccaatttgaacattaaactcatcatattatagaaaattaactttaacaatgtttagttggctaatttaatttaaatataataatccacaaaaggaataaagtaaatttgaacaatctactcactaatcattgtcatgttaattttaaaatactactaattacatcctgtgactaaaaatgtaataaattgtaaatattaaaatagccatattactattaagatagataaattgaaacgacttgctataaagcacaataaaatagcacttttacaaatattttattagaaaagttaaaacaaatacataaccccagataatatagtcattatcattaatgtaatatgcaaaaaaagaagttaaacaatgtatagttgcttaacttcctatattaaactcatcagtccaatttgacatagagcctattaaagcgtgtgccatttgagtgccactttatttgtattgtatagagagaaataaaaagaaaccttgctttacaaggtttctagtacgttatgttatgtaaataacagttaattataccggtggtcggggtcgaaccgacactccacaagtggaacgggattttgagtcccgcgcgtctgccaattccgccacaccggcttaatggtaaacaaaaaacttccctttggaagcaattatggagcggaagataggatttacacctatacctcgttccgggaaggaacgtgttctaaaagttgaactactcccgcaaatattaaattatggagcggaagataggatttacacctatacctcattccaggaaggaatgtattctaagagttgaaatactcccgcatcattattaaattatggagcggaagataggatttgcacctatacctcgttccgggaaggaacgtgttctaaaagttgaactactcccgcataaacctggaggcggcaaccggatttgaaccggtgataaaggttttgcagacctctgccttaccacttggctatgccgccaataactgggctagctggattcgaaccaacgagtgacggagtcaaagtccgttgccttaccgcttggctatagcccattaataataagggcggctgaaggggatcgaaccctcgaatgtcggaaccacaatccgatgtgttaaccacttcaccacagccgccatggcaggggcagtaggaatcgaacccacaccaaaggttttggagacctctattctaccgttgaactatgcccctattaaaaataataaatggaggggggcagattcgaactgccgaacccgaaggagcggatttacagtccgccgcgtttagccacttcgctacccctccataaatggtgccggccagaggacttgaacccccaacctactgattacaagtcagttgctctaccaattgagctaggccggctaagaaatggttcaggacagagtcgaactgccgacacatggagcttcaatccattgctctaccaactgagctactgaaccataataaaaatgtaatgatggcggtctcgacgggaatcgaacccgcgatctcctgcgtgacaggcaggcgtgttaaccgctacactacgagacctataaaatattgcgggaggcggatttgaaccaccgaccttcgggttatgagcccgacgagctaccgaactgctccatcccgcgataataaaaaataatggcggaggaagagggattcgaacccccgcggcccgttaaggccctgtcggttttcaagaccgatcccttcagccggacttgggtattcctccattattataggtaaatcgctattaattataaaattaaatggcggtctcgacgggaatcgaacccgcgatctcctgcgtgacaggcaggcgtgttaaccgctacactacgagaccattagtaaaacggaggaagagggattcgaacccccgcgagccgttaagcccctgtcggttttcaagaccgatcccttcagccggacttgggtattcctccaaaattatatggaccttgcaggactcgaacctgcgaccgaacggttatgagccgttagctctaaccaactgagctaaaggtcctaaatataattttacaactaataaatagtggcggtggaggggatcgaacccccgacctcacgggtatgaaccgtacgctctagccagctgagctacaccgccttatatagtttgtaaataatatggtggagactagcgggatcgaaccgctgacctcctgcgtgcaaagcaggcgctctcccagctgagctaagcccccataataattacagtatatcgggaagacaggattcgaacctgcgaccccttggtcccaaaccaagtgctctaccaagctgagctacttcccgtataattaacgcgcccgataggagtcgaacccataacctcttgatccgtagtcaaacgctctatccaattgagctacgggcgcatatatttttattgaaaatggtgccgaggaccggaatcgaaccggtacggtgatcactcaccgcaggattttaagtcctgtgcgtctgccagttccgccaccccggcactataaaaatggagcagaagacgggattcgaacccgcgaccccaaccttggcaaggttgtattctaccgctgaactacttctgcatatgcgggtgaagggagtcgaacccccacgccgtaaggcgctagatcctaagtctagtgcgtctgccaattccgccacacccgcaaatggtgagccatagaggattcgaacctctgaccctctgattaaaagtcagatgctctaccaactgagctaatggctcttccatggtgccggccagaggacttgaacccccaacctactgattacaagtcagttgctctaccaattgagctaggccggcaatatgtaagaataaatggtggagaatgacgggttcgaaccgccgaccctctgcttgtaaggcagatgctctcccagctgagctaattctccgatttaaaactgcctggcaacgttctactctagcggaacgtaagttcgactaccatcgacgctaaggagcttaacttctgtgttcggcatgggaacaggtgtgacctccttgctatagtcaccagacatatgaatgtagattatacattcaaaactagatagtaagtaaaagtgattttgcttcgcaaaacatttaaatttgattaagtcttcgatcgattagtattcgtcagctccacatgtcaccatgcttccacctcgaacctattaacctcatcatctttgagggatcttataaccgaagttgggaaatctcatcttgaggggggcttcatgcttagatgctttcagcacttatcccgtccacacatagctacccagctatgccgttggcacgacaactggtacaccagaggtatgtccatcccggtcctctcgtactaaggacagctcctctcaaatttcctacgcccacgacggatagggaccgaactgtctcacgacgttctgaacccagctcgcgtaccgctttaatgggcgaacagcccaacccttgggaccgactacagccccaggatgcgatgagccgacatcgaggtgccaaacctccccgtcgatgtgaactcttgggggagataagcctgttatccccggggtagcttttatccgttgagcgatggcccttccatgcggaaccaccggatcactaagtccgtctttcgaccctgctcgacttgtaggtctcgcagtcaagctcccttatgcctttacactctatgaatgatttccaaccattctgagggaacctttgagcgcctccgttaccttttaggaggcgaccgccccagtcaaactgcccgcctgacactgtctcccaccacgataagtggtgcgggttagaaagccaacacagctagggtagtatcccaccagcgcctccacgtaagctagcgctcacgtttcaaaggctcctacctatcctgtacaagctgtgccgaatttcaatatcaggctacagtaaagctccacggggtctttccgtcctgtcgcgggtaacctgcatcttcacaggtactatgatttcaccgagtctctcgttgagacagtgcccaaatcgttacgcctttcgtgcgggtcggaacttacccgacaaggaatttcgctaccttaggaccgttatagttacggccgccgtttactggggcttcgattcgtagcttcgcagaagctaaccactcctcttaaccttccagcaccgggcaggcgtcagcccctatacatcaccttacggtttagcagagacctgtgtttttgataaacagtcgcttgggcctattcactgcggctcttctgggcgttaaccctaaagagcaccccttctcccgaagttacggggtcattttgccgagttccttaacgagagttcgctcgctcaccttagaattctcatcttgactacctgtgtcggtttgcggtacgggcacctattttctatctagaggcttttctcggcagtgtgaaatcaacgactcgaagacacaatgtcttctccccatcacagctcagccttaacgagtaccggatttgcctaatactcagccttactgcttagacgtgcaatccaatcgcacgcttcgcctatcctactgcgtccccccatcgattaaaacgattataggtggtacaggaatatcaacctgttatccatcgcctacgcctgtcggcctcagcttaggacccgactaacccagagcggacgagccttcctctggaaaccttagtcaatcggtggacgggattctcacccgtctttcgctactcacaccggcattctcacttctaagcgctccacatgtccttacgatcatgcttcaacgcccttagaacgctctcctaccattgtccaaaggacaatccacagcttcggtaatatgtttagccccggtacattttcggcgcagtgtcactcgactagtgagctattacgcactctttaaatgatggctgcttctaagccaacatcctagttgtctgggcaacgccacatccttttccacttaacatatattttgggaccttagctggtggtctgggctgtttccctttcgaacacggaccttatcacccatgttctgactcccaagttaaattaattggcattcggagtttgtctgaattcggtaacccgagaggggcccctcgtccaaacagtgctctacctccaataatcatcacttgaggctagccctaaagctatttcggagagaaccagctatctccaggttcgattggaatttctccgctaccctcagttcatccgctcacttttcaacgtaagtcggttcggtcctccattcagtgttacctgaacttcaacctgaccaagggtagatcacctggtttcgggtctacgaccaaatactaaacgccctattcagactcgctttcgctacggctccacatttactgcttaaccttgcatcaaatcgtaactcgccggttcattctacaaaaggcacgccatcacccattaacgggctctgactacttgtaagcacacggtttcaggttctatttcactccccttccggggtgcttttcacctttccctcacggtactggttcactatcggtcactagagagtatttagccttaggagatggtcctcccagattccgacggaatttcacgtgctccgtcgtactcaggatccactcaagagagacaacattttcgactacaggattattaccttctttgattcatctttccagatgattcgtctaatgtcgtcctttgtaactccgtatagagtgtcctacaaccccaacaagcaagcttgttggtttgggctcttcccgtttcgctcgccgctactaagggaatcgaattttctttctcttcctccgggtactaagatgtttcagttctccgggtgtgccttctgatatgctatgtattcacatatcgataacatgacataactcatgctgggtttccccattcggaaatctctggatcaaagcttacttacagctccccaaagcatatcgttgttagtaacgtccttcatcggcttctagtgccaaggcatccaccgtgcgcccttaataacttaatctatgtttccatcctacaggaaacgcgttattaatcttgtgagtgttctttcgaacactagcgattatttcttatgaattcaagcttatttaaaactctttattcactcggttttgcttggtaaaatctatattttacttacttatctagttttcaatgtacaaataatggtggagactagcgggatcgaaccgctgacctcctgcgtgcaaagcaggcgctctcccagctgagctaagcccccaaataggtattaaattaatggtgggcctaagtggactcgaaccaccgacctcacgcttatcaggcgtgcgctctaaccagctgagctataggcccattaatttgaatgaacaaacattcaaaactgaatacaatatgtcacgttattccgcatcttctgaagaagatgttccgaatatatccttagaaaggaggtgatccagccgcaccttccgatacggctaccttgttacgacttcaccccaatcatttgtcccaccttcgacggctagctcctaaaaggttactccaccggcttcgggtgttacaaactctcgtggtgtgacgggcggtgtgtacaagacccgggaacgtattcaccgtagcatgctgatctacgattactagcgattccagcttcatgtagtcgagttgcagactacaatccgaactgagaacaactttatgggatttgcttgacctcgcggtttcgctgccctttgtattgtccattgtagcacgtgtgtagcccaaatcataaggggcatgatgatttgacgtcatccccaccttcctccggtttgtcaccggcagtcaacttagagtgcccaacttaatgatggcaactaagcttaagggttgcgctcgttgcgggacttaacccaacatctcacgacacgagctgacgacaaccatgcaccacctgtcactttgtcccccgaaggggaaggctctatctctagagttgtcaaaggatgtcaagatttggtaaggttcttcgcgttgcttcgaattaaaccacatgctccaccgcttgtgcgggtccccgtcaattcctttgagtttcaaccttgcggtcgtactccccaggcggagtgcttaatgcgttagctgcagcactaaggggcggaaaccccctaacacttagcactcatcgtttacggcgtggactaccagggtatctaatcctgtttgatccccacgctttcgcacatcagcgtcagttacagaccagaaagtcgccttcgccactggtgttcctccatatctctgcgcatttcaccgctacacatggaattccactttcctcttctgcactcaagttttccagtttccaatgaccctccacggttgagccgtgggctttcacatcagacttaaaaaaccgcctacgcgcgctttacgcccaataattccggataacgcttgccacctacgtattaccgcggctgctggcacgtagttagccgtggctttctgattaggtaccgtcaagatgtgcacagttacttacacatatgttcttccctaataacagagttttacgatccgaagaccttcatcactcacgcggcgttgctccgtcaggctttcgcccattgcggaagattccctactgctgcctcccgtaggagtctggaccgtgtctcagttccagtgtggccgatcaccctctcaggtcggctatgcatcgttgccttggtaagccgttaccttaccaactagctaatgcagcgcggatccatctataagtgacagcaagaccgtctttcacttttgaaccatgcggttcaaaatattatccggtattagctccggtttcccgaagttatcccagtcttataggtaggttatccacgtgttactcacccgtccgccgctaacatcagagaagcaagcttctcgtccgttcgctcgacttgcatgtattaggcacgccgccagcgttcatcctgagccaggatcaaactctccataaaaattatgatgtttgattagctcataaatactaaataatgtttgtaactaatagttacgttttttggaattaacgttgacatattgtcattcagttttcaatgttcgtttgtcacttacaagatttaattataacttgtaagtttttgtaagtcaagaattatttttaattattttatttctaaaaaataaatttcctaactcaattaattcaacaaatattattttattatgtatttgttcgaatttcaatagtcaaatttacactttattaatattttaaatcaacaacttaaaacatttgatttttaaatattagtgccgtttgacgacttttatataatatcaagttattctagtagagtcaacataaaacaacacttatttttgtttaaaaattactgttgaagggattattttctattcgtaagtactatatgtatttaaagtgtaattccttacgctttttgcttcagttttacaaacaaacataccctcaatttatggatagttatttaagtagatctttgtttgtatatttttatgtttatttataaaggttactagttattagttaataccacttccgtagttagaatgttcttttcttctatttaaatatttttcagaataagcataaaaaagaagttaaacaaccttcatgtcgtttaacttctaaaatattacgcttactatatatgaagtaagctaacgcctttttaatttgtcatactaccaaagttaaattatttatcttggcattctttacaaactccataaatttccattcgatgatgtgttacgtcaaagtcagtcatatgctgagctaatctttcaatttcatttaactgtggatattgaaaatcaacgatcttaccacattgttcacatataatatgataatgattatgtgtattaaagtcgaatcgacttgatgagtctccatatgttaattcttttacaattccaatatctttaaacactcttaaattattatatattgtcgcaacacttatatttggaaaatcaggtgaaagtgcttgataaatttcatcagctgttggatgagtatgtgaagaaattaaataacgtaatattgcttgtctttgaggtgtaattcttacgcctgcttgtcgcaatgatgcaattgattcttctagttcatgttcaattgattctatttcaacactcatctaaatcaccatctttcttatataataattattattacttactataaatataactgttgtattgcgcgcgtgtcaatatttacatgtcgatttcatttaatagccttttttagcatcaacttcattctcaattagactattcttattgagaaaattaactagattgtttttaaaaatatctaataagtcatactttgcttcataatcattaccagttatatgcgctgttatagttacattatccaattcatataattcatgattaggtttcaaaggttcattttcaaacacatctaaatatgcatgtcgaataactctactttttaatacttctattaagagcgcttctttaactatggtacctcgtcctatatttataaaaagtgcttcatctttcattaattcaaaatgttttttctttagtaaatgaatcgtttcttgcgtttctggtaaagtatttataacaatgtcagcatttggtaatgtgctttcaagtgattcgatggtatatatatcatcaaactcatctttgttctgacctgacttactcagaccaattaaattcatattaaaagcctttgctaacttcgcagttctagtagcaattgcacctgtacctaaaaataaaactgtttgtcctgacaggcgtttaccagttattttcgaatcatatatatgttgtcgttggttatcatatgatagtttcatctttttataatcatctaaaatgaaagccaaaatgtattcagataattgtttagcttgaacaccttttccattagttaaaagtatgccgtgatctgcaatataatctaacggtaatatatttacacccgttgcaaaccatgcgatccattttaaatttggacaacgtcgtaaaaatacctcattgataccgccatcataaccaactaatatatctaaattagccaagtcgctctcaggtatttctgatgcttttttataaaatttaaaatctacatctgaaaagcgttgttgtaattcagtttcaacttcacgcatacgattcaacccaacaactttcatatatgtcaccccaaaatgtttttaagttcttctatttgtgttttaactttaaccttctcgataacatctaatactttaccttgttcatctattataaaagtcgttcttacaatgcccatactttctttgccaaatgatttttttaactgatatacgccagtttctttagctaatttaaaatcttcatctactaataaatcgaaattcaatccgtatttttcaataaaattttggtgttttttctttgaatcaccgcttataccatatactgcaacatctaaatcattgaacatttctaaattgtctctaaagtcacaagcttctgtggtacaagtaggtgtattatctctaggataaaaataaataatcgcctttttaccttttaatgtatcatttgtaatgacagttccgtcttgattttctaatttaaatattggaaattgttctcctttttgcaacatataatcacctttttcttcattataataattttatgatacgatattagatgaaaatattaaattaaaagaggttgatataaatgaattttagtgaaagtgaacgtttacaacaactttcaaacgaatatattctaggcggtgtcaattccccttctcgttcttataaagctgtaggaggcggtgcacctgttgttatgaaagaaggacatggtgcatatttatatgatgtcgatggcaatagatttattgattaccttcaagcatacggcccaattattacggggcatgcacatcctcatattactaaagcaattcaagaacaagctgctaaaggtgttttatttggtacgccgactgaactagaaattgaattcagcaaaaaattacgtgatgcaattccatctcttgagaaaattcgctttgtaaattctggaacagaagcagtcatgacaacaattcgtgttgcacgtgcatatactaaaagaaataaaattataaaatttgctggatcttatcatggccattctgatttagtattggttgcagcaggtagcggcccatctcagctcggttctccagattcagctggtgttccagaaagcgtcgcacgtgaagtcattactgttcctttcaatgatattaacgcatataaagaagcaattgaattttggggtgatgaaattgccgccgtattagtagaaccaattgttggtaactttggaatggtaatgcctcaacctggatttttagaagaggttaatgaaatttcacataacaacgggacactagtgatttatgatgaagtaattactgcattccgttttcattacggtgccgctcaagatttattaggtgttatccctgatttaactgcatttggtaaaattgttggtggtggtttaccaattggaggctatggtggacgtcaagatattatggaacaagtagcacctctaggtcctgcatatcaagctggtacaatggctggtaacccgttatctatgaaagcaggtattgcattactcgaagtactagaacaagacggtgtttatgaaaaattagacagcttaggccaacaactagaagaaggtttacttaaattaatcgaaaaacataatatcacagctacaattaatcgtatttacggatctttaacattgtactttacagatgaaaaagtcacacattatgatcaagttgaacattctgacggcgaagcgttcggtaaatttttcaaattaatgttaaatcaaggtatcaatttagcaccttctaagtttgaagcttggttcttaacaactgaacatacagaagaagatattaaacaaactttaaaagctgcagactatgcttttagtcaaatgaaataacttttaaggaagtatatttttaattgaattaaaataaaacaaatgctcacatagtagattcattttataacgttaactattaacgtttaacttgatatgtcactatgtgagtttttattttacaaattaagactcttttaatctctgactaaagttttacatcactatcagtattatgtatgatttattttaacaactataaataagcttgaattttgtaactagtaagtgtataacagtaatgaatacgaatattagatattcaataaatttaaaaggggcgtcattatttttgagactaggagctcggatttttaaaactggtatagccattattttagctatgtctatcgcttctttactaccggatgatgttggtctgaaagccttagctggtgtcagtgctgttgttgcaatgcaacctagtatttatcgttcatttaaaacagtttctgatcaagcattgggtaacgttataggtgccatactttctgttacaatggtaacaatttttagtgataattttatcattatgggtgttaccgtcatagtacttattgctattttatttaaatttaatttagcacatgttgctactttggcgagtgtaacagcattaatcattatgggacaacataccggttctttctatattaccgccttttacaggtttgtacttgtaatgattggtgtcataagttcatctctagttaactttgtgtttctaccacctaaatttgaaacgaaaatttactataattcattaaatatatcctcagatatttttatgtggtttaaattagtattaaatgatacgacggagtttaataatattaaacaagatagtcataatttaaaacaacgtgtcgaaaagttagagaaaatttatgattactatagcgaagaacgtcctattacaaaaaaacatattcaccaacagaatagaaagaaaatacttttcagagaagtagttcagacgactagacaagcttatgaagtattaaacaaattgtcgcgttatcaaaacgacttatatttacttaataataatttcctattacaaatcaaattagatttagattcattaactgcttttcacgagcaaattttagctagcctttctaaaaaagcacgttataatgtgacacatgttgattatgagttagataatccgcagaaaaaagatttattgtctacatttcagcatgagttaataaatcatccttatcaaacggaatattcgtttgccaatgttatgcaaattgttgcagccatcgaagagtatcgacaccatttagagcatttagaccgcataagaattagctttttcacatatcatagatctgatgcagacattgaaattgttgaagaagactttgatttataacattaaaacaattcctgtaattaataccacaatgagataaagtaatattgaatctcgaaattaaatttaaaaaagcagtaagattattttcaattaagaaaatctcttactgctttttctatgttatgaccccaccatcctgttacaaatctttcctacaaaattgtactgaagtcaaacaactaatactttataagttttgaatgctatataaatactcgtaagcaccttgttttgcaatcaattcacgatgcgtacctgtttcaacaatatgtccattttcaattacgacaattttgtcagcatgtgtaatagtggacaagcgatgcgcaacgataagtgtcgttcgatctttactcaacacatctaatgcttcttgaataatggattcactttctaaatcaagtgcacttgttgcttcatccaggataagaattggcggattatttaaaaatattctagcaatcgataatctttgtttttgaccacctgataatttaacacctcgttcacctacttcagtgtcatatccctgtggcaagttcatgataaagtcatgtgcattagccattttcgccgcttcaactacttcttcatctgttgctgttggacgaccaagtaaaatattttccttaactgtatcagagaataaaatattatcctgttgcaccaatcctatttgatttcttaaacttcccgctaaaaaatctttaatgttgtgaccatctattaaaatttgcccagaagttacatcgtaaaatctcggtattaagttaattaatgttgatttaccaccaccactcatacctacgaaagcaactgtttctcctttttcaatactcaaattaatatcttttaaaattggagcttcgttatcgttatattgaaaactaacatgatcaatatcgatacgaccttgtttaatttcaataggttgagcaccaacaccatttttaatgtcataatcttcgtcaattaattggaatacacggtccattgaagcaaaactttgcgttaaagttgtaaatgatgcgactaaacgacgtaaaggcccgaacaataactccaagtatccaacaaatgctgcaagtgtacctactgtgattgatccagaaattgcaagatatgcaccaacaccgatgacaattattggtccaatatctgtaactgtattaattgcggcaaaggaataggcattccatcttgtatgtttcaacgcacgtgttaagaaattagtgttctttttatcaaagtttttcgcttcattgtcttcaatcgcaaaacttttaacgactgaaataccttgaacacgttcatgcaagaatccttgaacctcagctaatgcttgagatctttcacgcgtcaattttcttaatcttccaaagaaaacgtacaccgttaaaatgtaaaatgggaagataaacagtgctgctaaagtcaatttcacatctaaaaagaacattatggatagtgcaataataattgttatacaatctaaccaaatattcattaacccggttaaaatgaaatcttttgtttgttcaacatcattaatcactctagatattacttgacctacttgattattagcataaaatctcgcacttaaagcttgtaaatggttgtataactttttacgtatatcatacaatattttattacttgtccattgcgccaaatattgacgtataaattcaattggtggtctcactattacaaaaataaataatgcgataccaatggcaatagttaaatgatgaactttttcatcagtcgttagtgcgtggttattaatcacgccatctattgcatatttaattaaaagtggtataagcattggtataccaaacttaactatcccaacaataatcgttgcaaaaatacgatatttgtatggcttaacaaattgcaaatatcgtttaatcatacaatcccccctaatctattgccctatcttattcataagtataaaaatgaatagaggttggatacataatttgtggatgtaaattcttcttacaatttacattttaaaattaagatatctcaacctctgtcatattcacgtgattaaatacgttgtcttattcgtatgttatattctattcaatttaatctatggatactgtgtccccacacgacagcaaaaattatcatacttctttacatcactaagtcaatataaatgatttaatcagtatttacactttatttgcttaatattgtctaatttttttgtaacggtctttccaaactttgataaaatctggcgcgaatgggcccttcttctgttctatccattgttgaagaatgtccacgttgcgtcttaaaataatatcaatatcatgcggataattcatttgattcatatgttgctcatattcatcttcatctaataaatgatactttccgtttggatatactttaatatctaaatcatagtctatatattttaatgcttcttcatcacaaacaaatggtgatgacaaattgcaatagtaataaattccatcttctctaaacatgcagataacattaaaccaatattctgagtgaaagtaaacaattgccggttcacgtgttatccaagttcttccgtcactttcagttactaacgtatgatcattgccaccaatgacaacatgatcagtaccctttaatattgttgtttcagaccaaacgcgatgaatcttaccatcatgtttataactctgaattttaatgttttccccttctttaggtatggattctctgaccatactccacaccaccttctgttaatttaaccattataaattatagcatatttcagaaatagtattatataaatacatatttttacgaaataagattttactacttaatgattaaactcggtaatattgctaagtactacaacagagatttacatgtcccatttaaagtatataaaatcatcacttttataaatcaacactttaactttttgacattgttattctatgagatttaaaggtatcatttatacatttttaaaattaatgtcactatattttccgataatcttatcaatcatcgaatgttacccatttataaattgataaatctttgacataggtacagggaatgtatattgatctcgatcacttaaatcaaaccaaatcatgtcatctggtaatgtttcaatgttaattgttcctgaaacggcgtatacctttatcttccatgttaaatgagtaaattgatgcttcaactcaaaaataggtgtttctactggttgaatgtcatgaccgattttttcagtcatttcacgtctagcatgctcactttcaaacataggaaattgccacataccatgcaataatttttcgctacgcttttgcaacagatattgaccttgattatttctaattaaaaagacggattgctcaattacttttttacttacatttttagatttaacaggtaacttttcaaatgtccctttatcaaatgcctcacagttttcttgaactggacaaaataggcataatggatttttcggtgtacaaattaatgcccctaattccatcatagcttgattaaacgttccagcttctgtagtaacatatggtgataattcttgttcatacgatttcctcgtcgattgtaatttaatatctcgatagtcatcattcaatctagaccatactcgaaaaacatttccgtctacagttgctagtggtacattatatgcaatgctcattactgcagcttgtgtgtatgggccaaccccttttaacgctttaaattgatcaggatctttgggaactatgccttcatatttatcatgaacttctttaattgccgtatgaaaatttcgagctctactataatatcctaagccttcccagtactttaacacttcatcttccgaagcttgactcaaaacttccacagttggaaatcgttcaacaaaacgatgataatagtcaataactgttttaacttgtgtctgttgtaacatgacttcacttaaccaaatatagtacggattggtcgtttgtctccatggcatttctctttgattttcatcaaaccagtgtatcaaattttctttaaaactagactgctgatacatttataaaaccctttcctcaccaaaattaattatctttactcataatgtttttattgtacattaaaatcatgattagtatgtaagttaatttagttatttgcgaaattggattataatagaatatataatattatgaaatgagtgaactgatatggatactgcaacacatatcgcaattggggtgggccttacagcacttgcaactcaagatccagcaatggcttctacgtttggtgcaacagctacaacccttatcgttggttcattaattcctgatggggatactgttcttaaattaaaggacaatgcaacatatatttcgcatcatagaggtatcacgcattccatccctttcacaatactatggccaattttaattacatttttaatattcacgttctttagtggaaccaacccatttcatgtatggatgtgggctcagctcgcagtatttttacatgtctttgtagatatattcaattcttatggtacacaagcacttagacctatcacaaacaaatggattcaattaagtgtgattaacacatttgaccctattattttcacagttctttgtattggtattgtattatgggttataggcttgcatccatttgcagtcttctttcctataatcgctttactaatcatttattacatgattcgttttaaaatgagagccgtaattaagcaacaagctttaaaagcaattcaacaagagcatcaccctgttaaagtatttgttgcgccaacaataaaatttatggaatggcgtgtcgcgatacaaactgatgcacatgactatgttggaaaagcatatggtaggaatgtggtgtttagtgataaagtggaacgtcaaaaattatcaacagactccattttatggaaagtcaaaggtaataaagatatacgtacttttttaaacttttcatcaatctatcgttggcaaacaacaacgttagcagatggttctactgaaattcgtttgattgatttgcgttatttaaaaaataatcattattcatttgtggcaattgcacatgtaacaaacgataatgtcatagaccactcttatattggctgggtatttacagaagataagttacaacgtaaactgtatgctaaataatttcaatttattattcactaaagttaatctataaaaaatgaacaaccgggcagaatgaaaatcaaagcgatttttattctgtccggttttttaatgtaaaactataaatgcttttacaaaacctaaaatttatattgtcgctaacaaactacctttaatgactcgaaatatcaaaatcagtataggaaaacaatatctagattatattctaattgtttctgattctcacggattaatttacacaacaagtcagctaaacatcatgaagaagtatccgcctcgtctgtactatcttttgaaacatcttgttgattatcagtttgtgtcactttagatgttttattataaattgcgtgtgtcgtataccttgctaatacgaaatttactgcagctattaaacataagaataaaataaagtaaaaatgatatggaatgttttccatactcgatataccaaatatgatagattgtgctataccattaacaatgtaatacattggattcagcattaggatgtgattgataaatacatgatttggatttggtatgaaaataattggtaacactaagaaacacaatacacaaatcccataaaatatgatatttattttttcagttaacagtcgaataagaccaaaagtaactgatattaatcctacaaaaatagttgccatcacaataaaatagaatagcgctatatatgatgtttcgaagtttactggtttaaccaatgcactaatcatcgtcaaaatgactagcataataaaacttaaaatagacataataactactggcgtcgctgcggaaatattaaataacttagtaactaaaaagtcattcatataatgatgataagagatataaattgtgaacatcaataccgcaaaaacaatcaatgcaataagtctaaataaccatcgcacctctttaacatcggtcaaatgactaaaggaaaatagcgtttcacttgcaataataagtattaaacatgcagctaatacgattagaaaacttttccaactttgttttaaacgttctgttacataccttttagtatgcggtaagtttttaaaatataaaataatattatctagcatctttacacctacaattcaatataaatccatttgtcttctttcaaattggcaatacaatatccattcccaactttagtaatccaaatgttattgttaatattaaacttatcttttaattcttttttatctacgattggataaacaaaaccgtataactgattattatcattgaaaagtaattgtatcggttgttgtgtaacggatgcaacgaaacggttatcatcatcaggaactaaagttttaataactgaactatgctttttatgtaattgactgttaaagtatgcatagtaattactataatttgatttcatatatggcgctaattttttaaaactatgcgtttgatataaacctgccgggttaaaatattctaatttatctttactaatatagtaagtcttattatcggcggtaacacgataatttttactattttcgccagtaattgtaactacactatattttggaattgtgacttgtttatccccttgcatatccacactgccattaaaagcaattccataagctaacttttcgccatatggatctttattttcattttgcatcgtagcacgattcgtaaaatctgttatcgaaataattccaatattattgaaaatgagcaacatcatcaatgctaagcctaaaatagtacctgaggctaaagtccaaaaacgcactaaaaacttaggtggttttgcatgattatagcgctcaacacgtttgaaattataggtcatctccggtattcttgtacgattctttttccaatctaaatcaaagttttcaatttcttcttttgagtttaaacttaatcgatcacgttcatgttctttaaaagatggaataacttgtttaagtgacccttccattcttaattgaccatgtgaaaaccaagctatatagttactcacttgtgaaattttatcaatatcatcaccaattgacacaatcgttaaattattttcaatataatcatttgttaattcaatcgcacgttcaataaattgtggcgttaaatagtcaataacatgatttaaaataataatatttgattttgatgagcgtgcaatacttaatagtaattgagcgtatgccgctttcgaaatatggttaaccggcttcgttttataatcgcctaaatgtgcatattgaataatctgttcagctttatgatcattaatttcatatggaaatagttgaactaactgcgctgtgtaagcttcaacagtttgatgaattaacgattgatcttcaatatatccgtagaacaaatcttcagtacaaactactttacctttatcgggtttaattgcacctgccaacaattgacctaccatcgctttggaagattcaggttcaccaattatacctaatgcttctccttgataaatatgtaaactaatattgtttaaatcgatatcttcagcatcatatccaaaaggtaaataccattttttattctgtttattcctatagtagtgtgttacttttagtaactttaaaacaattgaacttcccatctattttcatccttctataattgtaataacgctataggtaagccttcttcgggttcatcgctattaaatctaaacccccacgcaaaaataccttttaatctttctactttaaaatattgattactgccatcagtcagtttataaattttaccaatttctatcttttttctgtctactaagtaactttcggcaacaattactttactttgataaacgtcatattcatttaaaataccattcatctcagcttttctcattttctctttataaagttgtatttcgtgtcttaattctggctcagacatctcactcaatttcttctgttccatcggcaataccactttcttctaatttagctttaattttatcatatttatatccttttctcataaggccttcgatagtttttgaaattaatttttgttgcgtgtacttctttcgatttttattataaattttttctaaatctcgttgtaataaatcgtctaaaaccgcttcatcttgtgtaaaatccatttcattcaatacagcatgaatggtttccatttcaaaccctttttgaattaaagattgcattactttttctttaaccttattttgtggccccttttttgttttagatattttttcagcaatttggataatatcatcaagttcctgttgttctctataaagttctgtaaacatttcaatgatatttggttctataccaagttgatatagtttttgttgataaattttaggtcctttatctgtcgtgcgaatcattgtattttttaaactttctgcataatcttgatggtcgattaacttttcgcgataacaatattcaatcacttcagaaatcgcttgctctgatatctcttctttttgtaaatattgtaaaacttctttttcagttctctttttatatgataaatattggattgctttatttaaacctatgcgataatgatcatacttttgaatctctgccatgtcagcagcttcaagttgttgccctttttttaaattaaatttgactaatgtatcgatatctatacccatttcaaattgttcgtctaaaaaaagattaaaacgttctttgtttttcttttgaacttctattttagtaatcttcggcactggatcaccccgttactttctcaagttttaatacaatactcttttattattcaataagccacttcctatagcaaatgtttaactttaaatatttttcgatgctaacaaaaaatcacactatcatcttttaaaatgaaagtgtgattacaagcaaatctgtaaaatttattaagcagaaacaattcaactttatcattatgacatttcaattaaaccttctacattattgttccaagtatcttacacatgaatgcaagtatttaacgatttaattgtgacatagcctgttgatattgtgtttcattgatataattttgttgcttcattttttctaagttcgtgcttacacgttgcgtaaaattctcagacatattattgatattatatacgctaggtgcattgactttactagctaaaatagcactttgtaaaactgtaatgtgagacattgttgtactatttttattcacggttgttccaaagtaatggtttgctgctccctcaagcgtatattgattatccccaaagtaaatattatttaaataaaagcttaaaatttcgttcttattatattgtttttcaactcgatgagctacaaataattcttttacttttctagtaaatgaacgatcattatcataaaaataatttttgacaacttgttgtgtaatagtacttccaccttgcacatctctgtcgctaatcgttgaaaataaagctctagttgtacctttcaaatcgaatccatgatgattgtagaatcgttcatcttccattgaaataaaggcacctttaacatactctggcatgttatcagctgacacaaaactacttttattttcaatttttcttagttcatccacattatcgcgtgtagataaaaaatacatgataccaataaacaatgcgataatgattagaatggttaataatattttcaatagtattcgtttactttttttctttttcggcggtttgccaactggttgataatacgtattatagtgaggttcgtgtttcatatgctcaaaatgttcatttgagtttgagtacctatcgcttcttttcatgcgtttgctccttcttttaaaactcacttagtatataccttgagtttaccagtactatcacaaataggctacactttttgggaaaatcagtccaagggcttacaatcgtatacgccatcatacttactttttttgttttttgaaaagattatagataaatcattgtgattttaaatattaatcatgtcaaatattgttatattttaaaaaaataaaagaccatccctactaaatgccaatagagatgaccttttatttgttattcattttttaaaactgaaatccatatttcatttcaatcgaaaatatataaattttaacaatcgataaccacaatacttctattgtaattgtttaacaatttctcgattaaaatcatctaaatcgtctggtactcgacttgttacaatattgttgtctacaactactgactcatcaactacatgtgcgcctgcatttgataaatctttgcgcacgttcaatactgctgttaacgtacgaccttttaaatcgtctgtatctattagtatttgtggcccatgacaaatggcaaatgttggtacatcatttttagtaaagtatttagcaaatgtgccatatcgaccttctgtatctccacgtaaatgatctggtgaaaatcctccaggaattaataatgcatcataatcttctggtttagcttctgcaatacctacatcgacagtaactttttcaccgtgtttaccaacaacttcactatttgcagtatctccaatcactacagtattaaagccagcattctctaatgcctctttaggacttgaatattctatatcttcaaattcgtttgctagaataattgctacttttttagtcattgaaaatcacctttctatatatatatatatcattgatataaatactatagacaagtaaatcagtgattaaacatacaagatataaaaatattaagcgactgtcgcgatatctaactctgacacatcttatgtggtatttacttagatactaatttaaccttttcttcaagctgatctaacaatccaatccattcatctatatcttcaacacgtacttcatcaggatttacatgatcgatatcctcaataaacttatttaaacgcgcttttatctgttcgattgtttgctgttcattcataaaaagttaactccttttattttgttttctttttcattattatcctaacagaaattgcgttaaagcgatataatcttagctatatttatgacattcaaattattttgacttttaaaaatccccttttcaattaactaaaattaagagataatttgttacgagtgataatacgaagtggtatcataccgatatgaaccaaatagaaagaaggaagtttaagacgatgaatagcgtcaaattgaagcaacctgttagcattcacaatgatccatgggaagtgaaatttatatacatttaaatttcatgagacaataaacgttgatttaatgcgttttttgccttttttattttccttattttttctgttttacaacaaaatggtatcaaaaatggtatcatttgtagttattttagcttcatatattaaaataaccacactcctaaattaataggtggtgtggttttgttgtattaaaaaaccgaatttaatatatctatgttttatttaacatgaatcgccttgttatttaaaaaatacacctattataataccgataatacttacaacagtaggtgcagctatacctatccaaaagcgattactagttaattttttatcgttgatttcatctttcaaattttttattgctaagtctatgtctttactcaacgaaatttgtgacttttttatactgtcttcaactttatcaaatctagtatctaagtgccttttgtgttcctcaaattccggtctagtaatgtattcataactcatattaccaccctccacttttttaaaggctagatttccaccaatactgtcacttgtataaaactcactaccatctactctataattatcatatcgtggatgatcattgattttaacgatattattcatcgccataaatttcgctcatttcattttgaagagtatcaatatctttaatttttccgtgcatattttcatattgtgataaagcttgttctaaagctttatttaattgctttgctagactaggattcataataatttttttattacttaaaaatccgctaggggtatgttgtttgaaatccaccataagatctgtgatgcttacctgcacatctaaagcgttagcataaaatatttcatagctttcaccaaaaatataatcattacttttatttaattcaacattaagtttttcattttcgtccatatattttcctcctacattaacgtctatataaataatatatgagataatctgagtttagtagacagaacataatggcgaacaaaaaacaaccacccagtaactagtatgggtggtttaagtatgcagtcagcttcttactgctatacgcaagtaagccctctgcacagccggattggctaccggtaatgtggttttaagccagattggttactggtaatgtaattacattataacataaaaaataggcaagtaccgtagtacctgcctgttatctacatttaaatcttgagagaaatgttaaaaagttctagtaaaataatagcacattttatctttaaatgtaaatagaaagcaggtatgtagcgcacctgctcaaatagacatgactatgtcattctaactgatttctccccataagtcacctaatatctgattaggtggggcagaaccattccatgttctaataggcaagtaataacgttgcccctcccatgtatatcctacccaaacatgaccatcttgtaacatcacttctgtataatcacaatatccaccaggttggaattggtaagctaccgggcatgataagaatggtcctatttttcttacagtgattggttgattaccgtttgtgaatctagcactttcttccatgtagtaagtaccatatttattacgtttccatgcactcgcaactggtttaactgtattacttgaagcgcttgactcattagagacagtggcaactggtatcttaccgtccatatacactctaatttgcttgataaagtagtctttaagttgtaattgtttatcttccggcaataggccacgagttactgggtcaaaaccagtgtgcaatactgagcttctgtgtgggcatgatgttgaagtgaattcgttgtgtaatctgattgtatttctgtttgctggtaatccccattttttcaacaatctagcgcattcttggaaagtcgcctgttcattttttaaaaacgtcgcattatccgctcccattgattgacacacttcaataccgtaataatatttattgcctaattggttagcagtatgccaacctacttgcgattcatctaaagcttgccacactgtgttacctgatacataactatgcgcaatacccgcttctaatcttgatgaaggtgcgttaactaatccgtttcgatacgcttctgctgttgcccctttgcttcctgcgtcgttatgaataactatacccttaggattaccaccacgtttaggaaggtcataacctttaaccacatctttgataattttaagttctaccgctttaggttgtggcttagctgtttcctttttagatgcttgcgtaggagattgaactgatcgtggcgctgtctcacttttaaaattcggacggataaaccacatagggaaatcataagcatgttgtcgtcttgtaactttttcccaaccccagccgggttgttcgattccgtcagtccagccaccgcctagccaattctgctcatatacaatgatgtaatctaaagttgcttcaattacccatgcaacgtgaccatatccagcaccgtagttgctaccgaataccaccatgtcgccaggttgtgctaagaagtccggtgtattttggtatacagtagctaatccgtcgaagttgttagcgaacggaatatcttttgcgcctacaccttttaggagtaatccaaacaaagctttccaaccagcattagcataatcaaagcattgaaatgcataccataagtccacattgaattgttttccctcagaagttttcaaccactctataaactcttttttagttaattttgcttgcattgtcgccacctccatgatgatactcattcacatcaaagccaacatcgttagaggcgtctgtgaaaggttgtgatgtatcatattcttttggtgctttcgtgcttaattccggcgttaaactgctgtcttgtgatgatttccacgtaacttgttgttcttctttattgctatctctaggcgcttgatatgtctgtgctatagatgaatctgagacgccttttgacgttgggtcagtaataacgccaatacctgtaagtaacgtgaggatagcgcctataattgcgctagcttgatttaattgagtagataaatctaatccgaataaatccgtgacttgcttgataaataacaacaatgctccaactaaacctgttaatactgctttatttttaaatctcaatttccagttaatatccatttgtttgctccttttatccaaaataaaaaacgactaaaaaattagtcgtttaaaattattcaatggtcaatgtcggagatcctgaataaacatcacttatagtgacatacaacatccctgaaggattactaaagttgatatttttacttgcaactccgctattgactcctgatattcctaaatcacttgaacctaaattagtttgcgaaaccctcattataccgctacgtacattttctattgtcacctgataacttttattaggttcaactccgtttattgtccattttgctgttgattcttctatgctatccggatatttatttttaggtaagggttttattacaaaagatgaaggctttttccatacttggatatttccagcatatacttttgtatattcttcaccttcgtaaataaacttctttacatttttaaaattaccttccataaaaatcaccctttaattaaatacaacgtattcgggtctttttgatatatatagttatattcattttctgttcctgtccaaattttaaccgtcggttgagatgcgctttttagttgatataaattatccgcttgttgtttagtaaaagcttgagatgacaaaacataccgctcgtcatgattatgattttttggagcatataaatcatttagtgtttgtttgaatttctcaaaatcttctgtactaacttttgagccaatctgttgcaatacactttctgaaatagagttgttttgtattgcttctgctaattctcttaatgtattcatagattcaggcgcgctatcaactagttcagcaatttttgaatccgtatacgttttagagtcgttgagagttgtatctttgattttttcaacttcttgcaatttattttctaacccttcaacatttgcgatattgattttgtccaatatctcaggttctgctttgatatctgtatctttaccatcaatttgccacattttagtgtcaggattgattgatactacagtaccgtttttaccgggtgcgccttgttctccttttttacctgtctcaccttttgcaccaggttgtcccggttcgcctttatcacctttcacacctttaaatctactttcattcttttcaatgtaagaaatgacatctttatctattttctctttaaagtctttgctcaataaatctgtcgcgttatcttttaagattctcgtaatagcatcatctaccaatttaacatcgatttcttttgctacagcagattcaatgccactatcaacgatattgaaagaaaagttcgcgacatgtattttttcttcttctttctctaaaaacagcttacagcgaacataaccagcgtgtttgataacctttttaggtattttgtaggtaaggaacccttttacaacatcgtcgataataaggggctcatttttgaatatagagccatcttccataaacaaatgtaatctaggtgttaagccatgtgcttttagatcgatacgaccttgtttgtcattgatacctattcttatagatgctgtattttcatcttcagtgtaaaatcgacagccaatgtcacctaagtcaacaccatcattttttattctcgtttcaacatcttttattttgtacatttacacacctctttatttatatttatcccttgtgaagtagataccttttaagccgatttgtttatataacttagcgattgtacttgcttgatgttggcaccactctatagcagtagcgtattggtgggtagctggattcttaggattccatctaattcggtacaatgtgttttgacctttattgatgtaatcctttcttacgaagctagcaccgcccatgattgcttttgctggagatgtccaacctttatttttagcaaacgtcattgcataatcagggtcgttgtcgaatgcaccaataccgaagtaattatatgcaccgtatctaccactagcgaagttacttgttccgtatccactttctaagaaagcgtgcgcgatcaaataaatttcgttaatgttgtttttcttacaagcttccgcgaatgctttgccttgtccgtcgagcgttccttttcctttaagtattttgttaagcgcactaactgaaatgccttgatacttgcctaaattaagcatttgatagcattgcgtgttactttcccatattcgcttaacattcattgccgagctcgtttgtgctcgtgttgcattagcccagccccatgtatgagattttttcgggttacccctagacatttgtctatccagtgcttgctggaatgtgaatggacttgtttcagtaacgatgcttggtttttcgtctgatggagtagggcctcgtgtggacgcactgtcaactgatgttttatcactaattcttattgttgtttttgtcgttacttcttttatattttctcgtgtcaatatatctcgtttaatgtatgtctcaagcattttctttttaacttgctcatactttgcgttatccggtataccttgcttaatcaagtcgtaattaattaaatctttcatactacgccaaatattagggtctacctttaacgtcgtttcagataagtttttatcaatccctgacaataaccaaacaccacgtattaacgcttgtatttgattcaataagaattgtcgtttgctatctgtttgaccaccacatacttcaataactagccaattagggtgacgcgggtcatcaaaattggttggtctagcaagccatgtagcctctctatcgacatataaatgcggtatttcataatcgcttataaacttatttctttgcgtatacagttcgtctacagaacgcatatgcattgattcttttatatataatccttgaatatctgagcgttcatcacccattacaactatatgatcaatgaagtgctcttctttatctaaaacattgctgtaagcagtgtattttactgttttaacttctttaaattgcggtttcttcgcttcgccagtaattgttgagtcattggcttttgatgctgaacttgtatcagtactactaggtttgctagtatcttttgagtatggaggcctaacaaagcctgtaacacttacataagggtgtcttactaatcttcctggagaacctgtccaactattagaattaacccagttttggtcaacgctataaaaataacttttattagatggtcctactactattgcggtgtgtccgtccgaacctattccgttgccagggtgccaaactgcgatgtctccaggttccggtacaaatccagatgaataacgatagaatcggaaacccttaggatatctgtaattagccatatccttagcattgccccatgttacaaaaccccaatatcttttaaaaataaagttaggtgtatcccaacattgactgccccgataattatctatattaatcctcttaccaatattcgactttgcccactccaccacttcactagctgtaggctttctagtctttgggttaggtaatcccatgtatgcacctcatttcaatcaaaataaaaagccagtgccgaagcactgactcttaactgttatttacatttaccaaaccagaagcacgcccagaagctatatcctaaaatccctttaagcatggtaatcacctcctttaaataccaaaaatagttcttagtaaagctatgacaatcgtactgaagatagtccctatcaaaccgagaatccacattttcatatcgcgtatatttttgtcgttttctttcttatttttttcgtctatctgtctttccctctggatagcatctaaagttttatctaatttaatgttaacttgctcttgagttttttgacctaatttaatctcattgagagtgctaagcattgttttatcattctcttctaatcttctaattcgccattcatgttcgtgccgtttggtaaatccaaacattacgccacctactttgtgttaaattaaaaagcctcaagcattacacctgtgacttttcatcttttgcctctggatatttttcaccagtgatcaatgcatattcttctttgtcgattacacccatgtctacgtaccacttaatttgctcatttttatagcaaccccacacataaaaagttttaatgtctttaaaagttggataaatcatcttcatcatttaaacgtcctcctctgtatttgttttaccagcttttagttcagtcaactgttgtgttaacatagcgttttgttgctttaattccatcgccaaaatgtttacttgcgtcacctgcatttgcatacttgcaaccattccgcgaagttcttcatcactcaaatctgattcactttgttggtttgatgcattcggtacgtcttctttttcgaaattgctattgtatttaatttcgccgttagtgaaaacaaactttctaggttcgaactcttctttaaatttaataggcacattgttatcatctacatctaaactattgcgtaatccgccagtattaacgtatccgataacttcgtttttatcgtttactgtgattttcattatttccaccccacaattttatttatcgtaactctgtttgcattagcaccagaacctgttttactgcctaaatcaaggtacacatcgttatcgatttttaacgtcgtaccactttctttagttattaagcattcataactaccaccaccgttaccgtctgagtcaactacatttgttttacttaattgaatcgcatttggtatagaggttaaactgaatgcttcaataacaccacctggataagtaccgcttatgaatagaattgcataatttgtataagcttcggttaaattaatccttgttcctacaccgtttgcagcaccgtcgaataacacggctgttttatgttcgttaggtgtagcccattgtgaatctaatcgaccattggtgattgatcgtgtataaacttttttagagtttgaaggtgtgaagttgaataacttatttgcatcatctttaacaaatactgataagtagccttcgtaactttcaacaatacctggtaaatccggcactcttgttgcatagtaattaccagcagttaaatatcccaaatcgccttgcgcattattcaagttaacttgtattgattggccattcgcctctgtcatcttatgttgttgccagctcgttgttccgaatttatcatctacatactgcttagcttgatttaaagcgttgttagacgtttcttcaacaaatttcttcgttaattcttcgtcaacttttttatagaactgataccatgtgccaccgattttatattttgtgtactcatcatttgaatcgtctggataccatgtagcacgagctgtattattatcaacaacataaacaactaacacaccagatttgcttgatgtataagttgattcatcgaacgaagaaccgtcatcaacaccatcttgtccgggcttctctaacgtgcctatatccgccttttctggcgcatcttttgcattagtaatatgaataatcatagatgagttagcgtgtcttaaaacagcttctattgactgttcagatgattcgatcgctttaccgtaatcatcagtaagtttagacttttgccaatttgttgttgaattacctttaacaaggtcagcgccattgatttgttgttcaacttcgttaacacgttcaaaaatcgcttgctctttatcaacaattttctggaacttgctatttatatattgaacggctttgtcttgtgttgctgtaatcatctgtaccgcttcattttgtttgatttctaatctttgaataccttgattaatacgactatcaatttcagtaaccaacgattttgtatcactcaaacttttctttaagtcctcaacttcttctttaacactttctgttaagtcctgaattgatttgatataaactagctttgttttaccgtcaaaattactaattagatcattctggatattgaagttaaattgacgctctacaattacgttattgctaccgttttgagtaaaatatgcttgcgcatgtactcgaccagtgtattttaagaactcgtttgggataacgtattgcattcgtccattaattgcatcaacaattgtaagttcatcactaatataagcgccgtgttcatcgtcgaagttatccgtcttaagcacaatactagtcatcgcattatgtttgctgattgataacggcttattattcttagttactgcaaaatttaaaacaccagttcctctatctgattcatagaaactgatgtttgtgtcaataaccggattatattgtgatgttgtttgtaactcgattaagttatcatcttttgaaaaattatctactaccattattcaacctccttaccttctattatgctccaaccactattaccaccagtaccaaagtttctaacgaaaaactggtgagcagaagcaaagttattacgtcttagcacttgtgttgtgttacctggtgtattcgattttacttctaatatccaacctgcaatacctttaaagtctttaggaaaatcagtaaatcgttttgattcttcagtagtgatatagaaatctaaaccaacgatttttaaatctgataattttgtaatactcttagggatatgttcccaataaccggcgttttgcggacagaaattccatgctccgttgtttttcttattgaaaatgtcaatgacacgttcaaatttaagcatatttctacctgtgctgtttctggtaagtacttgtcttagagcaccattatagtgtccaggcagtacatcaaagaaccaacctgcatctctaaacgctttcggtaacgggaaatctaacgcattttgtgtgtcttgcgtatagatatagtaatgaccaacttccgtaatatcacttagatatgctgggttctgtattggtaacggtttaacacgtccgcctgaatcagtcattgatacttgaggtgcaatgttttttaagaattggttaacacctctttggccgatagaataaattgagtgatgtctgttattaccaggtccaatagttacccctattaaaagtgctttacgtcctgtttctagatcgtaatacatatctagaccctcagcttcttggaagtctcctttaaagttattattcacaccgccaatatcgatacgtcgtttaaataacaattcttttgtttttatatcgaaaccttgtaagtagttagggttggctgtattcgaatcacctgtataccaatataagatacctgcatcataagtgataccttgcataggttgtgtatctgaagtgtattccataggtatatccatttgatacaatactttgtctatacctttatcaatatcgtcagcacttcttacttcaatgaaattcaatgaattcttagcttgtctttcagaagctttatattcacgtctgaaaatcattaaattttctataggattataaatcgctgacgtatatctgtcgttaaatatattcggcatgacatcttgcatttcattaccataagttatttctccagttctatattggaaacgtacaaacttgttgtttttgttactgtccaatacagctgaataaatccataattctccatcaatgtatctatacgcattgtgtgtaccgtgaccgccgtttttaacaagcaatctatcaataaattgtccgttgggcttcaatctagataacatgtaatgattacctggacgagcttgcgtcatataaataattttcgttctagggtctacccaaaatgattgcattactgcgttagtatatggcgataaatctgtgatgaattccggttcttgctcttttggttcgaatcggtattctgtcgctcgatattctttatagtgttcatctacagctttctcaacctttttagtgaaagcatctagtgttgaataatcatgatacaaacgatcttgcaatgtcttatgaccataacctgtattatcaatacgcgcgtcttttacttcattgataccgtcgccgttatggcctagaatcatattgctaaaacggccatttaaatacgttaaataatcttcaacactgtcattcaagtatttaatttgtttcgctgagtgtgcgtatatttcttctttttgatggtatataaacattttctcaagtttgctcataccttcatctaacaagcgatagttatactcatgttgagcaactattttccgacccgtcattgaatgtaaacttgtaattaatccgtaagccattggttgcctcctttagtcgcaaaaactgtaataatccttgattaactcgtacataataacctcgtgacctttttcgttagggtgtaagccgtcctccatgctcgctttcctaaaagctggattgtatggcttaaagtaatctgtgtgatatgcgtcaaacactggtacatctaactcactacaagctaatatttgagcgtttacatagtcctcaagtgttaaccctagtttgtttttgtccgtgtctttacggcgtattgttgtaccactcatagggcattgtcttgtagctgtcatcactagtatttttgaatctggattattctttctaataacttcaattgcagaacaaaaggcaccgtaaaacgtttttgtatccgttttatcagtgcctatcggtacgcctgcccaataaccgtgtaaccagtcatcatcagtgccttgtaatatgattaggtctcctcttatttgctctgcttgtctataaatgctgttttctaccgcttctttacctattggaactgttgccattgttgcgccacctcttgcaagattagtcgttttagctttcaatttcttgcctaacatttctgtgaaattagtttttgcgtgcgaccctctagctacagagtcgccaatcgttccaattgatttgatgtttcttatacttgattgactagtaaagtcgtacatgatcgtaccattagcagttgtaactgttttagtattcatcttatcgactttagcgtttattttttcattctgcttaaccaattcattatttatagataaacttgcgttaacttttgcgtttaatgcttttagttctttagatgggtcggattttgtagattttacgcttttaacataatttgcagcatcatgaactgctttgttataacgattacgccttgtaaagtctcctaatactacatcttgcttagtgatattattgtacgcatctctatgtgtagtgatttcgactattctcactaagtcgttatatcctatggcagaatccaccactctaacaacatcacctattttagggttagcttctgggaaatgttcacgtaacgctacaaagtctaaggaaatagaagcagtgacacttttctttatcaataactccattgctttttttaaactatcttcttttttaatacgtccatcaacaagcggtggcgcttctcttttacctatcaattgtgctaatggatgagtgaattcaatttgtagtcccgcttctgcaaaagtctgttgtccatcaaaatcaccataacctttaataaaggtataacatttagatgcatcttcttgtattttgacgttatcagcattcacaccagctttaatgtaataattggcaaacttagataattcatcatacaaatgaaacgttttagtctttgcatcgtattcatattcgagatgataacgctcaagtccttttttaaagatttctaatcgtgtatctcctttgcctaatccctcgaatttagatgcatctacttttggatgtaatacatacttataacccgttcctttaaagacagtattgaagaactcaacgcctgtaaaactttcgttatactcttggtaaatcctagaattgttaaggtcatcaagttctttttgcctagctttgatatcaagccttattttttcgccaatagtagacttatcaagtatgacaattacatattcgttgaaatcatcttcaccttcaacatgagtgatcgtccacattttagttatagcacctattgcgtcaaacgtactcgcgttctcgataatagttagatccaaagaactatcttcatttagctttttacttacctttgtactaacattaatagcgtgccctacaccctgtagactttttaataaaattggcataggctactccttatctaaaatataatttgtgtctaaatgtaatttgtttcattactttattagacttgaatcgattccagcctggatataaaaccggttgttctaaagttttattaaaagaatctatatttaaataacctctataggtatgtttaccgtcgaagattattttatctccggcttttaaatcaacttccttaataactgagatatttcctttatctgtatagaaagtgaatccatccttatcattagctttaacatcttcagctaactctatttcaacaacattaaactgattaaactgtgttaaaggaacatcaccgttataataaacttctcctgagttagtgttgtaaaatgtcatttgacgcctcttatcaccttcgtttgtaggcaatctatcaggtaccgaccatttttcagggtcgttattactttcaagatcagtactataaccgacactttcaaagtatggtagttcggttgtttcaaacgacaaagaaaattcccctgatgtttgtgttgtgtcaaaagaaacttcacttactagtcctacaaaaagttgtcgtccatcaacataatcaagctcaaatgcttgtttgtcttttggtatatctaatatatgctcatacttaattgaattgtctggtgtagctaattcccttaaataaaaacgtccagcaaatagtgcttggacgtctgactttaaatgtgaagcataagcaattttaggtactttataccttatcttaagctctacttttttaagttcttctttagcgtaattatgaaatctaccatcaataccctctatatcagaatagttacgatgatatcctgcgcctgtaacgttatattcaactacttccaagtgattataagtgaaaggattgtcactgacgcgatactgtgaaccattccttattacttctatatcgtgcgctatcaactaacaaacctcccttataataagttgaaacttccgtctatagcgttcatgtcatcaatgcgtgatttaattaaatcaaggtcgccctcatttctaatcgttacattcacaataggtctattattttcttttaagctatgttgaacatcgctagtcatgtgtctgtctatagaagtacttacaggatttactatactatctgtcaaagtagaggatagctctttattaaaggcactgccaaagtctgtagcaattacttttgcttgtgataccgctaaacctttacctaagctactacctccaccgtgtccacttacgaatgaagttacagagtcccaagctgatgaaatcgcatcgcctaccgcgctgactactttgtgcgcagcattggctacaccctcagctactttgccgattaattccgctccggcatttaagaaatcactgaagaaacttttaatcttaccaagtgcatcactcataccgtcacctacatttgaggcaactcttttaaacccatcagctactttactcgcgaaacttgtaactgtattccaaatgttagaaacccattcagaaccttttgtgataataaagtttagtgcttgccccattttttcagctacactcgaagccactcgactgaaccaacttgtaacagtgttccaaatactgctaacaaaattagtgattgtactccatatctgtgaccaacttgtaccaaacatagaaagtgttcgattcattacgccagttaaaaagccgataattgactcccaaactgattgcatgtattgccaaatcgtatcaagcacattggtaaccgtagttttaatagtctcccaagcacctgagaagtcgccagtaagcaactgaattaaagcagtgaacaaacctactatgatttggactgctacggatatcactgttcctatggcttggaacgcaattgtaattaaagtccacaaaccttgtatgatattcataacgtttgtaatgatgcctattaccaaaacacctaaaacttgcatgaatatttgtcctaatacttgcaatataggcattatcggttgtaaggtagattggattttgccccacaattcagttaaccagccgactacaccttgaatcgcaccagaaactgccgttttaacaccgttccacgcttcagtaatagtatttctaaagttctcgtttgttttccataaataaacgaggacaccaatgaatgcaccaattactgcaacaactgctaaaataggtgctgaaatcgaaccgaatgcacctattaatgcttccgtagctccagtaactaaacttgatgttctaacgaagtctaaaatcttttcagtgacgctgaataagctcaaaccaaacacatttgtaagtacactacttatagcaacaatcggagccattaaagcccaaaatacaccgcctaaaatacccataacgccagcaacttgtgctatagctgggtgtgtttcgaatagtttagcgataaatccagctagattagtgataaagtctaacaatttactagctataggagccattgcagtaccaaaagcaactaatgcttttacgatattaccgattaactgcataatagtaggaccattctcttgaacataactgataaagtctttaaacccttgtgattgtcctacttgttctgaccatgctctaaattgagaagttaatttaaccaaccaatcaaaaatgttggaactgttttgtgcaaaagcaatcattaaattaccaataccagcgaacacattaccaaatatctgaccaatcttaggtaagttagtggtagtgtagtcaataaacgctttaatagcattctgaccagctacactattagcccaattttggaaagctatagacatgttctgtagtccttgagacacaaatttgaacaacggcattaattgagtgaaaatgttaactaatccgtcgccaaatcgtcctgcagcgttcaataaatctccgaagattgcgccacctatgctattcaatgcttcaaacgctttcttagctgtttcggaatgtttaacccaattctcaaactcgcgtgcgtttgcttcaactagcatagatacttcggataagaatggttttaattgagacatcgcacttgtaacgcctctgatacctgctgacatcgcattaaagatacttgcttgattctctttaacaatatcacgccatgtagtttttaactgatcgctcgcatctctaaagttttgaacttcttttgttactgccaatgttccatcttcaaccattttaagagcgctaatagccattgcaccaaagccaacaactccaagacctgcgacagagaatgcgccaactaaacctaaaacgccaccacctaatacaccaaccgcattaagtactgccattattgcaggtactaatccggcaatcactggtatcaatgcttgtatactagcaatcattaagcctttgacctgttgcgcgaagatagtaccgaaagttcggattttagtagctaaggcgtccattttctcgccgtaatctttcaatgagttgttaagtttaccccaaatatcacttgttccatttacttcttttctcataatctgaccaattcttccgaaagaacgtttaactgctccttcgacttcattgaattcttttgtgaatttatttcctaatttccatctgctggaatcaatatcaaaactatgcctgctaagatctattaaatcttctttaaaccctttaaccgccattttagcggggtttgcatctaaatccaacttaacaacatgttttctccaagcttcgacagtagctttagttgcattatatttggccattaattcagtgttacttagtttcaaatctactttatgttgtttaaatcgctctacttgagctttagcgcgttctaaattcgctttatactcatctgttttcatgaataatttaacagaatgctctcgccatcgttgagccattgatttagcgcgttgtaaagctctttggaatcttgaaatatctgcttttacatctgtttcaatttcgtttggtacagacgtctttgctaatcgttgagctttccttacgttgctttggaaatctctaatattggccataatctttgccataaaatgagtatccaaaggctaacctcctttcgattcaagaaattttcttgtaccttctttgaagagttcacgtcttcttttttcttcttctaatctagctttttgtacacgagcatagctaccaggttctcttatttcgtaacgttgtttctcaatgtcacgaatcatactagttagcctcttagaagcttgtactaagccgttagcttgcgcttgttcaattaataattgtctttgatctaggtacctatcctgaccaccaataagccaatcacgccattcagcaggtgttagtgctaacaattcatgttcagggatatatcctaaatatctagctgtcagttgccttatttttgagtaatcgtgtaaggttctgcgcccatgatttccttgtaattctctttcatcatttctatgcctgctttcgtcatttctttgtcctcgcttttggccatattcggtgctttgttcaatgtcatccagtacgagcgactctccctcttgaaaaaaccactattgttaagtttgtccaaagccccttgtaataacggcaaagtatcctcgttttcagtgatgaaatcatcaattgctttttctaattgttctcgagttggtgggttttttaaataagcagtagcacattcccaaaattgtaaaatcgctttgtttctagattctagcaaaccgttaaagataacattgaatcctggcattgctccttttctcccatcttcgctatcttctgagaatttttcagcttttcggtcaaatgcaaatgttacttttgcttctacttcgtaatctttttctccgtcattaatttttaatgttgtaattggattaaattcagtcaaaatatatacctcttttcaatttttttataaaaaaatagggagcttacgcccccttgatctattagtttacatagaatggtcttccgtgtgtgaatcagatacaacactagctttcttttgattctcgaatgttccgactttttcgccgaatttttcgtattcaactgtaggcgcacctgcagcttcaaaccactctttcggcaagttatcttcagcaccttctgctgtattccatttaacttttaatgatagttcgattttgtcactttcatcatcaaatgacatttcaaatgattctggaacaacataaccaaacattccgtgatgtttaccgtctgcacgtttattacgctcataaagccatatacgcaactgtccacctgtttgtacagcgtgtttcactgcttcaattcctttatctccaggcacattaccaattgttaatttaaatgattctgacattgcattgggagaatagtccgttttaccgcctcgtactatttcagctaaatcattttcaatcgtatgtccaccttcttgtaagtcagctaataataaagattctactggatctaagtcagtttcagctggacgtacaactgctaaatagtttttttgcgccatttaatacactccttcgtttttctttttatgtctgtacttaaataaaagccgtatcgtgccatgcttagtaaacctgtctatatcagggaatactgcttgactatcgatacggctaaattgaaactcgtaattatctatttctataggtctgttaagcacataacctatcgcgcttaaaatgagcttagcctcgtattgtgtagcgaactgtgaatacacatgtatgacaataccgactgtttctctcattgttgcgctagattcgttgttagtgacgtttgattcacccacaacaatatatgggtaaacagcgtcatcttgaacaacgtcaaaaaccctatcatcaactagtttgttaatgttagggtctgagattaatcttttatatatttgatttgtaagttcaggctcaactgatacccacatatttaaccacctctatgaaaaatactgctcgaatgtcttgcgtcctgcgtcaattgcagggttccaaaatggctgtggcgcttgaccatatgtggtgtaccattcgccgtcatcacctttaaaactccacggaatctttgtagcacgactaccaccaggaccagtagcatatataccagtaccgtattcaacgtatattgcataatctgcgccgacacttataacactggataacccaccatcgaaatatttaaagtcaatactttcttctaaaaaacctaagtcaacaggagctaatgctacagcagtgttgtaaatcttcgtcgttgttttagcaataccttttttaacccactcttctattttcttatcgaacttatccaattcaacaaccatgctatcagcaccgtacttaacttttgccatatggcacctgcttaagtcgtagtaacttaatttcatgttgtccgccctgatctacagaatcaccttcaatactaaagattctaccctcatactcaaataaattgtttttagatattggcaagtcataaggtacatataggtttctgtcatattcttgtgacatttgatgaaattttagttgttcagatgtagtaggcgtatccataaatcctttaattgttttatcgcttacaaagcgctcttgtataattggatactctcctacttttttgatacttccaatagaaatagtgtgagggaattcgtcgtatgggttaaacacaaacaacacctctaccttattggtttaaacggatgaaactttgctcgtttatacctgtttaatactccactaatgtaatcagggacaccatcgttataagtgtacgacactgtccccatacttcttgactttaaattctttttaacttcaggtcgttgataatactctaggacatctgcgacatactttttgattgagtaaggataaatggcttgaccatctttcataaaatcattgtttgttatatccctaacatcttctagtattccgtcaacttccatcttaaatatttcttcttcatcacttttaacttccactccatttttcttgagtaaaagtttaacatcttcataaagagtcatttttatcactcgctcttatcagacgtagtacgacgtgatttaacctctttgtaaccgacaagactgtaataagagtcaaatgccttctttgtaacagtaatagtcatattgtctttttttaccttaatctcttctgcaggattagccatcatatctcctcctattcagttggtttaagcgttgcgaacgcttctggtttaacgttcatgtatgcaatatgcatcgtcgcacgtaaagcgaacatatcacgttcaaataatgatactggttggccagaagcatctgatgcttgtaacgtcgttaacgtggcatcttcagaaattgcatactcaataccttgtaagataccgtaacgtgcgtaatcccaatcacccattagtgctaacgatttctttttgtcgtatacatccgctccagtataagatagtggtaatcccataatctcgttcccgttagcatcaaataatggtctgtcattagcatctaaagcattacgcattttacttctgaatgaacgtgtagttaatactccgtttggatctaactcttcatcttcaatagtagccattaatgccgaaaggtctacgtataaattattagtatctgtaacaacgttacctttctcttctgcgccttcaacaagcggtttaccactagttgaagtgttgtaaggtgatttagtaccaaagataacagcttggtcaaacgctttgtaaaatgcctctgcaattagaggtttaacctcattaaagaaatcttttgcagtccatttaagaaactcttttgataacggaataattacaccaattttcttagcttccatttctgcttgtgcatattcaggcttagaagtttgaatacgttccgtttctgatacccagtaggcgcctacaccttttgctaagtaagtaaattttttcttttgtgctgtcattggctcatttttagctaatttcataattgctgaattagccataatgtctttcatgattaaagtaccttgttctgctggaataacgccgtttttaaaatccgataaaataacattgcctggcgtgtatgttggagttgccatattttattacctcactttattttctaatattgatttctttcgccatttcttcaatggactttacatttgaagggtctaaatcttgatttcgtgattctttaacatctcttccactcgatttaaatttagactcaacgcctttttgaacatacttgtcaaaggtttcttttaaagcttttaagttttgctcagtatcttcatcagaatcgcctaaaaatctatcaactaaggatgttggtaaatttagttcctgcgctttacctagcgcgttacttcttaacttctcacgttttgcctctgcgtcgcgtttttctaactcttgttcaagagcactaatacgtttttgttcttctgattgctcaggattacgcttccgtacttcttgttcgattagatcctcaagatttttctctttccatgattctaatcctttcgaatgataacgatctaattcaggttgaatgaatcgtttaccttcttctgtatctaaaaagcctttaacgtcatcaacagacaccgtcttaagtccctttagataatcttttacttctttatcgtctttgtgttcttcaaaaaaagacttaacttcttcgatattcatatatcaaaactcctttttgcccttcgcgtaccctaacagtccgaaaagtgcataataaaaagcagtttaacgacatgctaaggtcgagtagcaaagagacaactaaaaaagtgtgaaatcattatttttagcattttcttcgctaatagatgttttaaccatatctaaatcagcttcatttttaactgttacgtttacaacaactttttcgttttgtaactctattatctcttcgtacaaggatttaatgcgttctaacttttctatagcttcgccagtatcaacatttacttttattttaaaatccatatcaattaccaccttttcgcttatatttctcccactcacgataagtcatgaatgggataacttcatttttaccatcgtctttacgtgctctcattacagttggcaattcattttcatcaatataataaagtaatttgcaacgacaattaatattctctttcgcactgtttacaccaataaatagcttgggcgcctgcccaacacacccacttgatttaaaattctgatctatttccactgattccccatctaaatgacgatgagtatcacgtgttcgtgtatctttagtagcatgccaacgtttcttcatcttcaaaccgttatctttagcaaccattgcgctatcaagtccagcttgtgacattgctctgcctgcttctgtacgagccacacgcaatgattgagctttagacatgccgacatcatcacgtattgctttagctatcttagagtaaccctctccactcataataccttgtgtaatgtgcatacgtatctttttcaatacttcatcacgatgtttttgtagtgttggcattaaacgaatgaactcaataggttgttcaatagctgatttgattacctctttactcggaacatcaaactgcatagatgtttgactcgccatttcatataaataaaggctcataaggaatttttctatataagcatcttcttgtgacttctgaatcatcttagctacttgcctatagtcatcagtcaacattgtacctatacgagttaactccttattgagcctgttgtatttattgaattcagtccatgtaacatacacatcatcattttgatatttctcaaacatatctgcgatgatttgttttatctctttaagtcgattagcaaatagttgttctattggtttttctgctttagagattaaaccctcgatatactcatcaatatcattctgattggttattttgggatttgtcatttgcgtcaccttcatctatgtcaggtaatttgtcattaaattcaagactttctttttccatttcgtctaattcgtaatcaacatcatcaactagttgtgattgtcctaaccttgttcgttctgaaacttgtcccttcaggttaattagcacttgtgattcttctaacttattaactggaatgttacgagtgaacttaaatatcaggtttaaataactatcatcatccaagttgtaccctttacgctttaatgcagataaaataactttgaattgatacctcaacatagctgtcatcttacgctcaaacgtcatacacttgttctctaaagccataagtttaagtttcattccaatgataggtacatttccgttaaactcgtcagaattaaagtttactgactttgcaaaacgcatgatattcttttcgattcgatctaaatggttctcaatcattgtgtcatttacatcttttgttaagtatttaacgtccatatctttgtcgaacaactcaaatgcgccactcttttgtgtttcttgaatcatttcttcactcatacccataccgcgtaacacaaggtatgctaaacgtgtctgactaatctcacttgatgcatcgctcattgttaaatcatatgcgtcaattaagtgaataaccttttcagcatctcctatcatctctttgttgttaggtacaccaaacaatggattgtaatcaaataaatgttcatatcgtccaacttcttgcaaagcgtcaataccttctcctcgaaatacataataataagcattatcgtaaaactctgcgtacacataatcagtgccattatcatcatctttttcataaaagtagcgcaatgagtatgtaggttctaaaatattgtcgccaacaaaaataacattatagggatctatattcttaatcctaatatcaccattcgtatcaatatatgctaacctagcaccatatccgcaaattgctgccattttacctatttcagaatcctcatcatcaacactatttctaatggcaaagttggttataaactttttcaacttttcgtttttttctgcgttttcatctaaatcataagtaataggaacaccatgtaaataaccaacacgtgtatcaacaatttcgctgtcaaaagagttgttaagtttgttattaacagacacgtctaatcgccttacatttccaccagtttcaaaatcttctttttcttcaattggtcgacgtttgaatattggtacatagtcaatatgtgtcttgtatctattatagagattaaccattctctctctatcgtctttatgtgactctattagagcctcaatatgcttacgcaatattccttgtgcttcaatatcatctattaacttatacaatgtcatttccccctccttaatcgttcaggtttagtatgtgtgtatatggcatatcttaacgagtccaacacgtcatcaaattcttttataggctctccgtttgtagggtgccaaacatatttaaatacctcttgcttaaacctatccatattatcataaagaacaagtaacttgttttgtttgaacaacttagcaacttcctccacacccgatagtttacttttatcagcgttaattgcacgtaatctatgtcttctaaattcagtgatgtattcaggtcgtgcagtatcgcagtaaaaattaatattgccatatctacttacaatatcttttgcaataaccacccaatcatcaataaacttaaattggtgtgcgtgctcctcaataaaataaaagttaccatctatacctcgtcctattaacacaatagatccatagtgctcgtaaccccagtcgacaccagcaaagtattctttgataggtatgtcgtccagttcatctgctttaatcgtattctcattcaaatcaaagtcggcatatactacaccgtcaccagacacccacataccgttgatattacgttcatagaacatacctgatggtgttgaagccttaatagactctttatatctatcattaagaaagttattgtcatcgagcttaaattggtgactcagtatacctgctttaggatctgtattttcaatataatctttcaacaaccaatgctcgggatggtcagggttggtatctaccaatattcttgcaccagttccactacaacgtgacttaatctcgtcaaacacctcttcatgcgctaacgacgcttcattgatatatgcaccaaacgatgtcataccacgtatagctcctataccacttactttactgtgacctgtctgaaccacttgaacgccaaataacatgaatgaattatatttatcaaaattaaactcaatgccatatttgttagttaactctattagtacgtttttttgaatcgtacctaatgttgcaccagcaagtatatattgaggtgtctcaattccttcttcgtctgctatctttcgcacacgcattaactcacgtaaaaataagtcattgtttaatattgttttacctgtacgctttgctccgtgattaattaacataaaccaatcttgtttttgcgtttgcttcaatatttcaatttgtttgtccgtatataaagatttaagtttattcattgacgatcacttccgttattgcgtcgtgaagttgtttgattttatcttctgttccactgtcacctttatctatttgttcaatcttcttctcaagcatcttaatttcagtttctattttctttttagctaaaacttcgttacctaacgtcattctattcataccatctaaactagcgaggaatgcatcagctgtcgctttcttcactccctctatttcaatgtcattcttagctacattctttagccactcatattcttcaaaggccttttggcgtgtccattttgattgttcagctacttcttgacgcaatttttcgtaccttccggaaaccttccgatttttaaaaagtgtactcgcttctttatctagatattccccactcttacctttagtcgaataccctgcgtcaatatatgctttccgttggctcttgccctctatgagtcctagcacaaacttttcttgcttcggtgttaatttaatcaattgttttcactgtatcacacgcctttacgttaattactctagttatttaaatataaaaaatgcccctacatcttgtgcaggagctacgttcaataaatgtgaaaggaggaaaatagttatgactcaaaatgcaagaattaaactacccaccatataggcaggtagtaggtgattaatagcataacatatcatcttttatatgtttgtcacttctcaatcacatcgatgagaacatctaatgtggctattaccccacgtcttaagataattcttacaaatcaattatataaaattaattcacagtttaaaaatagtgtcattttcgtcatttctgtcatttttgtcattttcgtcactgtagtagataaatcttttctgctaactcatcacggcgcgctaagaagttgtttctatttaatttagagttaggcatcttcttgataatcgcatccctgttataacctttcttcaataactctaagaagcaaaagtcaacgtgtcccaatctctgttgcgattgatttataaactcaacctcttttaacatctgagcataccttttatttgctctctcaagcctcacaacaacatcttcaactttacttgagttttccccttgtggtttcggcaacgttgcttgtatgccatactgtgcaattgaattgctatcatattccggtattacatcagctaatacattacacttcattttatgtgtgcctatcatattaacaattgactctttgctatacatctactctgacacctccgccctcatcaaatcagactgatcgctcaactttgcgaagtcactcggcgcctctacatcatcattagccgtcatcataatatatacttgctccgttacatacttacctaactcatacattgctagtaagaataatagtcttagtatttgtttaatcatcattgtcatctccagtatcaattaaactaggcatcattcttaacatagcccttaattcatgttcattcatattagccatcataggactgtaaaattcactgtctttatcattaatttctttaatgaaatcatcttcaatcttagctttttcttcaggtgttttatttttatattttttgattatttcagtgtactttttcgggaatttcattttaggaatattaatcatcgtctgcctcctcaacattgatcccaactatataacctttgttcaatacaagttctctgccataatctttttctatcgttaaatagtcatcatcatttctaaaattgtccaaaacaaatactatttcgttaaataattcatcttcatgtaatatcaaactactaccgtcatgtaataaaattctcagctgattcatttcccacgctcctcaataagtgtgattgattcaatcgtatctgttttaatatacgttggctgtttgattatattacttacgtaaataaaaccattaaaatttaccgttctttcaacatatttttcaaaaggttcagctgtttttacaaaataaactccacctgaaatagttttaattttaacatccgtcatttcccacactcccttatattttcaaacaactgacccactttaataactgcatctcttttaacttgcgcctcgtatttctctttcgcttcttctttactctctgcctcaacaactgtaaacctttgattgctcttaactttagttatgtgtgtatgtttacgtcctgttgaatctttgaatgttgtgactaggtattgtgtcacttccccaaaacctccttgactcgatctaagatgtctttatactccgctacttccgaagccttttgctccacgttctgaaacacactcgaattcctccacttgctttagttcaggtgtccatataggcacgataaccaattgagctagtttgtcgccttcgttgatttgataagttccatattgtcttatggcgtcactcaaatcgatttctcctttaatatcaaaaacacctggtgtgatataaccattcgatgcaatagcgtcattcttgatattaatccctaaattgccgtgatatcccgcgtctatcttgcctgtttcaatcactaaatgcgttttactacttacaccactacggctagttaatagtccgacatagccctctggtatgcttacagctacatctgttttgatcactgccttttcttgtggctcaagtacgacagtttcagctgagaatatgtcataacctgcatccgtcttatgatttcgttcgggcattctagcattttctgataatagttttacttgtaatgtgttagtcattttcctattcctcctcatatttatagacaacttgacccgtcataatccctactgcttcatcaagttcaatatcttctttgagtgcatcttgcatacattaggtaaaccctcaagtatttcatcaaacgcttgcgctttcttatacacgtcttcaacctcttttagtaatccctctgtgtcattaccgttatacgcactagcactaataacggactgttcgattttttcgcgattattcatttgtgtcatcctccataaaaattttattgtttaattccattccgaatttaactctttcatcatcgttaccgaatttgtttattaaatctctttcaacgctcttgcaatacctatcccatgcgcttgctttcttctccagttctttgttacaatctcgtaacttcgctataaccccaataagctcatatcgttgcttcttgtactcttcacgatcttttaatgctttgtgaagtttatctaataacttgttagagttagtacaaagatttttatattgttcatctgataaggtgaacgtcatctcataacctccaatagcatctcattttcaaaaatatttccaacaatttcaataatatcgtcattttcacttagtaattcagttacattgctaaaagttatataaaaggctccttctttaaactcgataaaacttacttctctcgaataacaatcttgaacaatatccccttcataaatctccacaccgtgcacatctttaaatcctgtgtattgtaatagttttacttcattgaaacttttataacctgttgaaatcaaaatgtacccactattaaaatcgatttcgtcaataatactcataacttttttatctttatcccaagctttaaatttcaacatcatactagcaactccccatctttccagattaacgtcatagttaggccgtcgttcaagatgtagaatgctttggtagggaaaaacgtgttctctaaacgttcgttgatactaatacttgtgtgtaacgctgacatatagactccttcttgaatctcatatacctctaacaacctatcaaacttagtctcttccgttacttctttttcaatatcaactatgaaggggatatcaattggaataaaacttgacgtcgaacacttatttgtatttggatgaaaacgaacgaatccatcactaaatcctgttgaaaaaaatatttttccttgtgatagatccggattttctcgcgcccatttaattaattcatctaatctcatttcttttttaactttgattttcattgttatatctcctcttgaacagtaaatttatcgttaattgatacatatccagtcacattacataagatgctatcaacatgaaaagtcacaaaacagttgcgctcaacatcatttgaatagaatcttttattacctgataacttggggttatcccaagcccattggataagttcaggtaaattcatttctttttcaattttgattttcattgtttccatctcctctaaaataaagttagttgcttctgttcctcgtattccaaaccatgttgctttatatatattccgagctcttccgctgtatcaaatgtctttttcacaccttgccaatctggtacgatatgcccgtgaaagtaataagtgccgtttactacatgaatatgtgccactcgttcgttatcctgatacagatatctcttaaatccaaagaattgatttaggtattctttgcgtgcgttatctgtcatgatctacttcttaactttcacgaatatgtcgttttccaacaggtagcacgcataacgtcctcttggatgtttctgaggtacattaaacaagtgtggcttctttcttcttagctcagcctctctctttcgctttctttccaatttgcgttcgagtctagcttgttccagtctttctattgttttcttttctctgtactcgcttaaacgcgtaccttctggtgcgtccattgcttcatgtagttcccaaccgtcttttactctcttagaaaccattccagcggttataccgtgactttctattaattccatttcagatttggtaaacctatatggtttatcatttattgttacaatccttgcttttctcgccattttatccacctcttatatttcttctattcgtatgattattttgggctcaattccataacgctttgagctagttatttctgcaatttgattgtcatctttccacaaataattgttacaagcgtctagaactgtcttcatcaaattatcgatatctggtttagttacttttaattgtccaatcgcttgagttttctttttcttcgaccatgatttaggtggagtaaagtaaaactctaattcaatttttaatgcattttctagatttagctttggcatttgattttgtaaatattttttatgttctgtatattttgtaggcatatatgtgtgtgcatatctaccttttgtgctaaaacgcggtcgaggcgagcccataggtgcctcgaaagtttcgttaaatttaatttctatctccatgtaatccctcatatatattcaaataagcttgtttggtgtcctaactccatttgttcattatcaataagtgtttttaattcataatcatctaagtaccaacgtcgaccattgaattttgtgtgttttaatccaacaactaaatgccgtccatctttaaaatgtggtgtaactgaaaacattttgttgccgtcatgatcaaatagatagtatttatcaaatgcatccattttcaatcactcccatttgctatttagacgcttaataaaagcttctctgtctttctcaaggttttcatctacttccggcgttttcgtttctctcgtgctgtctgtgagccatttgggtgttttttcttttgattgtttaacgaaaggtttataattttgttttttgctttcaagttgttgcttttcaaatgcacgtacttgttcaatagatttcaagtttgcattaagccatgtattcaaaatgcttttagcatatccccaagtaactttatttctgtctttagcgattttaagtgatgcggtaactatttgatctgaatcattttcaaatgaatcaagataataatttaaatcgtctaaattgtaaggagttatgaaaccgaatccgttatcttggaagaagtcgaaggcggttaccttcttcttctcattctcaccattctttacattatccccattctttacattcttgtttgtgttgatttgttgttgatttgttgtccatttgttgtccatttgttgttgatttgttgttgatttgttgtcgtttttgctgtcggaattttcttccatactttgataaatcgcccaattgacaacggttataacagaaaatttgttgtcggactttacgacgatagttccaaggttttctaaaagctttatgtagtctcttactgtggattctttgagacgtaactcttcgcttgctcgctttctcccgaacacaaattgacctttttctaattcaacaactcgtctgccaacaagctgtgtatgatccttatgactagccttcataagacaatatgcaaatactttgaataacttttcgttctgaaaaataggcgaatctaatagttttctatgaagttttatccaaccagtcatatacacacctcactttcaaaccggttaaatcagaatggtaaatcatcatcatttagttcaatcggaccatttgcattcgcaaacggattatcttttactggtttgttatttgaatattgcgattgtccacgtgtttgttgtacttgttgttgatataaatcttgttgagtgtcatttgagttcttcggttctaaaaattgaatactatcggcaacaacttccgtaacgtatacacgttgaccttccttattttcatagttccgcgtttgtaacctaccatctacgcccgccaacgatcctttagataggtatttattaacgttctctgcttgttttttaaatacgatgatattaataaagtctgcctcgcgctctccttgtgcattcgtaaatgtgcggttaactgctaatgtgaatgatgctacatttacaccactttgagtggttcttaattctgggtctctagttaaacgaccaactaatattgttctgtttatcatttataaacctccaacataaacgggcacgcccgtcactttttgtatttcacttttaatgtattttgcatttgaattttgactacttaaatgaattaaatgtatttcttcgagtctagttaaatcatttgcttttaacattccgatagcatgttctaagctaaaatgagactccataattctgtttgctaatgtgctgtgcacactgccgttttttatgttttcctgtatttgttcatagatataattaacttctaacatcatgtgcgtaatgccgttaaatttgtatttcaaatactttgtatcagtaacatacagaaccttataacctaatgtactttgtaataagaaagccacaggctcgttagcatcatgttcgatgtcaaacggtagaattgaccatgtgcctattcgcagctcttgctttgccttaatcgtgcataagcgatgactttcaaaattcatagcttgttgtgttccagcagtcatatagctgattacaccattgtcgacaaactgctttgtatactttgcatgatcaccatgttcgtgtgtgataagacaccctgctatatgtcttgttttatatttgaaatgcttttgaacacgttcaaattttatacctgcctcaagtagtaacgtagtacgtccatcatttaagacgtagcagttaccacttgaaccagttgctattgtttcaattaaaatggctcttcttcgctttctttttctgttgcaggttcttttatttcttcaaagtcagatacatcaataggcttatcattttctaattctgtgtattgtgcttcttcaagaactggttgttcaaagtccaattgttcttgatttgcattttcttcaacttctgcgtccaacacttctttgcgttgacgttgttcggattcttgtgcgtatttgaaaatattgctatctgttgatgtgttgatataacgtttagcagctctattgataactgtttttttagccatttcttctttgaaattattatgtgttttagaattttgtaatgctttttcatctttaatcattgatgactgcatccatgcttgtttaatttgttcaatagtcatgacttcaatatagttatctcgtccatcattaaatacgattgtgcagtacgcaccgataatgttttctttgtcgatgttaaagaagtcttgttcgtgtttaatcgctttgatacgtcctgtttctcccatttcttgcttgaatgtatcgcctttataaatcacttgagcaacaacatcttgagcacctgcatcacgttttaacatcattacattaccgtgatagctacgttgtaactgcattttgttgccgtaaggaataaagtagcattgatttttagctggatttaaaccttgcgttaccatgtctaataaggcatttgctttgcttgtatcgttacaactcattaatttgttatcttggctgatttgtaaccatgcttgtttcatggcattacttggtgaataatcatttggcaattccaaattgccttgtgactctaaaactctcactttgtttaatacgttgtcagatacgttcttttcttgtactaattgttgttcaatagtttgtaatttattattttcagtcattttatatagtctccattcttaattttttatcttgttcatttactatcaattgaatttgttgtgattctgttttgataagctctgttactgattcagcattatcaataaatattggcgctgtaactttaaaatgttttgatagtgtgttgatgatatctaagccaacattaattcttgaggcgttatttaaaccgctgtcatactcgacaccattaaccgttgttgaacatgtttcttctaattcgccgttaactaaggtattgaatagcttaaattcagcaatatcaaattcgttattgatgttttcagtaagcattttgacttttgttgttgtaaattcttttaagatataaaggtcatgtgaatacttttctttttcatccaataatctgtcttcttcatttcttaattcagaaataacatcatctagatgtttatttgatttttcgattgatcttgacacttcaatttctgatttttcttgagtaagttcgcttattttgtcatctattcctgaaactttatcttgaatagttttcctgatgttagagcgtttttgattaatctcatttatctctaacattactgctttgtattcgtcagtttgcgtaacgtcaacgtgagttattttcaacttattaattttgttttgtattcttgctgaacgctcttctgcttcgttgattttaatttgaagattattattgtcatcctctaacttctcgatgattggctttattttcttgccttctgaaataatgtgattgatagatgtttgtattgtttctaattctttcgatttttttacattgaatttctgtaaagctttttctcttgcctcattcacttgttcagttggtaactgttgaccacaacaactacatacattgtcatcaagatgttcaaatttttgatttttagatttttctaaatcactttttagtcctttgtgattttccaataattgattacgtctattttcttcatgtgtgatttgttgtttgttttgctttaatctcgttttaaggtttgctaccgttccattttcaacgtgtaattcatttgttaaagcatggattttgttctcattacttgcgctgttattgtcttctatgcgtttcaattctgattgtttatcagctaattgattacgcaaattaatttcttctgcaccgttttgaatatctatacgctcattttcaagttgctcaatttcttgttttatgattgtgtgtctatcattatcgaattccggtacatcctgcttattttgttgcgtttggttaatacgtatcggaatatctttgatatctttgttaatctgttttatcttgtctgtaagaatctttttctttgtttcaatttcgtgatctccaagaatattatttagttctttaaaatcatcatttgttttaatgacatcctcatcattgattggtttagcgatttcaaacaacaaacttcttcgtttcttccaatctagtaagttaaatgcttgagggttcgtaattaacttgaatacatcttcatcaatcagttcatcaatacgagctttataatcctttacttttattgattcatcattgatatattgtttcttcgttcgacttcgtgagtattccttgcgattcgttttttgatttattgtgtatttaggatgtgactcttttttaaaagtcgtaatttttccgtcgatttcaaattctgcgaaaacagtcggaattaactcataattttcttcgtttttttcgtttaaaggtacagggttaaatgatttggttgatccgtccaaacctttatcgaaaagcagccattgtaatgcggttgctgtcgtagtcttacccgttgcattattgccgtatatttttgcatctttgccgttaaagttaaagctttcttctttgattccagcaaagtttgatatagttaacttatttattttcatatctttcctcatgctccttttttaatcttccgatgacctcttagcacctcgataattaaattttttattcgttcatggctgtctggattgatttcatgtatctgcacaagcttattgttcgttttgtaactgtcgtgatagtgcaagaaattaatcgataagtatccgtgatgattacgttcaatttccaataatgctcgttggtttgacaaagtatattcgtcgaataacgtcttaaaaatattcaatatatttctttctgtatctctcatgcttatacctaccatttcatgactaagttaattagtctgtcctgttcgtctgtgttctcttcaatccattcatctattgcttggttgaataagtctgatgccatatctaagtcattctcatctacgacataagcatgtttaattggtacattgttcatatctttaacttgtattgatatgcccatatgaccttttaaaatgaatagcttaaaatcgaatccgttaacatgaatatttttgcgtatgatttcgcctatttcgtaatacatcttgacttcctccttttttcgttttatattgaacacgaattaattttgttaatcgtttgtcactgttacttgttggcgcaagtagcagtttttttattcttcataaaagtattctttataaaatatgaatgttgcgatacttgcgaatcccgcaattgaccacgctgtagtgaagtatagaaacggcatgagtacaatcgctaagactgtgaagcataatactgctaatagatagcttttataaatgttactcattttcttttttcaacgcctccattattctctcgtctgacaagccgtgataagggaatttttctctagctaattggactggtattctgcctcgaatcgcaatgtaaccttcgtcttcaagctctttattcagttctcttattatttgtcctgctttggatttagaaacagataaaattactgcaagttctttagcttgcaaactattttttatcatatctattcctcctttttatttttgtgttgtgtataatttagttatctcctagtgaaaggaggtgataagtatggaatttaatgattttcaaaatttctttggtgaacttagtaatcaagccgaaaaagaattcggtggtgacagtgacttttttagagatagaataaataagttgaaagaagatgctcctgaaaacgtatcttacgaaattatttattcaatagctttatacgaaagcttaaaagctcaacaagatatgaaaattttgaatacagttaaatatcttttagatcgtgactagcaatatccaacaatgatttgctctgagcattattaatttttggataatcaaaatttctaagtttaaatcttgtgtttttctcaatctttacaaccttccacgtcacaactgccattgtgatgaggagggttgttttgtatagtgcgttcatttgtttatgctcctttcatgtataatgttgttatcaacctaaggaggtgatgcttatggctaaaagaggcaagaaaaacggtaagcaatctactagtagaactgctaaacttgctagcaaagtacttcgagataaacgaagtggtaagaaagctaaaagtttggctggtagcgtgcttgctcaatcttaatcaaccgctcttaaactcttgtatttcattttcaagatataatcagggtttataatcagttggtttttgttaccttgtgcatttgtgtaggtcgcaactacataagtgccgggtaactccatttcattacattccatttcacgaagagtacaattttttattcttgtatcatcgattaaatctacatactcaaattccatttgtagttcctcctgttaagcagttacgttagcttcataaccgaattcagtcataatttcatgtattttcaatctgcctttttgtgtccatctagtttgtaaaactgtgtcttctctaccgtcagagcgtacaattgctatagtgtctgattctgtgtaactcttgcccatgtgttctgagtaaagcacccactgtttatttacttttcgttgtagtctagcttcgtgtagtagtttgtttaacttttgtgctgatataccgtagtctgccgcgatttgagttgtggctaatgtgccagttgactttaagatttcatctacatagtctgctttgggttttagttctccgatttcttgttgtaaaagtaagttttgctctttttctttcttatactcagtcaacactgtaatgatgtagtctggatcttttaatgtttgttcaattacattgtctgttgcgtatataccgtgttttcgaatagctggtaggacatctgatgttacccatcgtttgaatttccgagcggtttctctaatgttttcgtttttactttgtttagaagcatcgaagattaaactgtataatcctgattcgttgataatgatcatatttctgttttgacctgatgcactaaattggtgcgtcagcttgtcctcgctatcaacatgatttctgatggcattgtctgcccttgcatatcctaaaatttcagcaatatcttttcctacaaaataaggttcgttttcaatttccactgttcttactggtagctctttaaaattaaatgtttgtaatgcttgcattgttcgttcctccttttaagatgtttgtttaaatttcaaattgactaacgtcaacaccatatttaattgccatattcttaatcgctgaaatgtaaatctcaatcaatctaggttcatcagtaatcacatctaattttgacaacttgttaatctgtgtcttcgtcgcaccgttcgctagcattttgcctttgcggttctgcatacggatttttaaattacaacgtcctttttcttctaatgctttgtaagcttcagacttaactttttggtgcattgctccgccacctaaatgttgcgcaatcgcagacaacattttgtttgtgtcgttacgccagtttttcgtttcgataccgacaatgtgacgaatacctgtgatttcttgttgcatttgttggttaaactgttcttggtctttttgcgctttgaacatcatctctaatgcttgcattggtgtttgtggtacattaagttgcgcttgttgtttaatgtgttcatccattttatggaatgcgtcaacatatgttgctgtgaacaaaattcctttactacctatcatcttgtttgctactatgtcgcatccttttttggttagtaggtagtgtttgtattgcttacctgttcctgcttggtatgaactttctacgaagaaatcatcagccctcaaacttgagttttgtaaaattacacctaaatagttatcaatatctcttactaaattgtcgtgtcgctttcctatcatttccgcaacttctctactgtctacataatgtgtttcgttctgttctactatttgtaatgcttgcataatgtttatgctcctttcgtgtataatgttgttatcaacctaaggaggtgataaatatgggtaagttttctaaaggttcaaactctctttcgaaaaagttgggtgatttagctgataaagctgaaaaactcgatgaaacaaattttgagttcaaccaagaggacctttttaacgattcgttcatgattgaaaatacaaaattcaagtgttttagtgattttattgaatcttctcctgtagatgtccaatcccaagaagattttgattcgttaaaaaataatgagtcattcaacaatttcgttagagaaaataccaaatacgaaaactggtctgatatgatcgaaaatgcaggttcaatccttattggcaagatgatttttgaataacttttatttcaaagttatttatcttctccaagttttcttcaaccgcctcgacagcttttaaggttgattcaatcaactttttgagttcgtcgaggtttgttgcttcgatgttttttatttgcaatccttccatttgttgttcctccttttaagatgtttgtttttgttctgttgacatttcggaaactctataagtaaaaaaaataccgcacttatcttgtggcaattctaaaacttcaattacttttgctaaatcgtcaacattaattctaatgtgtccgttttctttttttgaataagttcctggtgtcattcctaatttttttgccatatcagaaatcgaaatgcctttagcaatgcgttcagctttcattcttttgacgttgaactcatacatttgctcacctccgttttttgaagttaactcaatattaaactcaagtttcctaattgtcaacaaaaatctcgaaaaatattttttactcttttaaaatgctagttgtttcctatatggaaaagtgttattatactattataaataaaacggaggtaaatttgaaatgagaacttcagcagaaataggtaaattaatcaaacaactacgaaaagagaataatgtgaatttaactgattttgcaactaagataggtgtcaataaatctaccttatcccgatatgaaaacggtagcagaaaaatacctatggaggatatagctgaaattgccaatgcattgaaagttaccccagaatatttactattaaaaaatagacaaacagaaaacgaagtacaacatcgagcagctcaccttgaaggagaattgacagatgatgaatggcaaagagttttagattatgcagattatataagaagtaaacgtaagtaaaggatgtatcagatgggattatatgaagaaactttaatacaacatgattatattgaagtaagagaggctgatgtacttccagataatttagacggggtatggttaggagatctaattttaataaagcgtggtttatcagatacagaaaaggcaggaattctcttcgaagaattagcacataataaacttacatacggtgatatagctgattactcgaaattcaacaatcgcaagttcgaaaattatgcacgtagacatggttttacttcagctgtaccgatacgtgaaattgtagaagcttacaattatggcgtacgtaacttgtatgagttgtctgagtatctacaattaagcgaagaatacatattggaggcaatagaacaatataagaagatatacggtattggaactcactatggcgagtattcgattacatttgagccgttgagagtttttaaatataaagaaatatgagaaaaggagtcgtataaaagatgaatcaagttcctaatgataagttaacagttaaagagtcttggactgccggagaaatatcatattcaaaagaaacagtagataaaattgaaaatagtataaaaattagatttcttagttaaatcgcttgaactacactctctttgatggtatattacatatatacaaaacaagccgctgaaatatttgcggcaagcttcaaattagacaagtcgctgaaatatttgcgacatgagagggtgcatctgcgctctctctttttttatacaattttcacgggtagcccgcctacccttattattttttgccaattttgaggagggagaagcaaaatgccagtatataaggatgataatacaggtaaatggtatttttccattagatataaagatgtatacggtaataacaaacgaaaaatgaagcgtgggtttgaacgtaagaaagatgccaaactagccgaaagcgaatttatacaaaatgttaaatatggatactcggacaatcaaccctttgaatatatattttttaatcgtttaaaaaatgaaaatctttctgcacgctcaatagaaaagcgaactacagaatataatactcacataaaagaaaggttcggaaatatccctattagcaaaatcactactacgcaatgtactgctttcaggaattatttgttaaacgatgcaggtctttctgttggctatgcacgatctgtgtgggcaggttttaaagcagttatcaattacgccaaaaagcattacaagctcttatacgaccccacattatcggtaactcctattcccagaacaaaaccacaagctaaatttatcactcgtgaagaatttgatgaaaaagtagaacaaatcacaaacgatacttctcgtcagctaactaaactgttattttattctggtcttagaataggcgaagctttagctttgcagtggaaagattacgataaaataaaaggcgaaattgacgtaaataagaaaatcaatttaagtaatagagaaattgaatataatctaaaaaaagaaaattctaaagggataatacctgtaccaaaattaattagagagatgcttaaaaacatgtataatgaatcttctaaaagatataaatattttgacgaaaactattttatattcggggggttagaacctattagatacgttacctattcgtatcattttaaatctgtattcccgaatctaaaaatacaccatttaagacactcgtacgcaagctatttaattaataatggtgtagatatgtatttattaatggaattaatgaggcactctaacattacagaaacaattcaaacgtactctcatttatatactgataaaaaacatcaagctatgaacatatttgattaaatggtatcatatcggtatcaaataacgattaaggagtttataaaatgcgtaataacaagcctaaaataagaattcataatgacccatgggaagcatataacgatgttaaagaacatggccaattaactttaagtaacatcgaatttacaactacaaatctttgtaatatgcgttgtagccactgtgcagttggttatactttacaaactgtcgaccccgagcctttagatatggacttaatttatcgtagacttgatgaaattccaaatctgcgaacgatgtcaattacaggtggcgaaccaatgttttctaaaaagtctattagaaatgttgttaaacctctattaaagtatgcacataatcgaggtatatatacacaaatgaattcaaacctaacattgcctcaagatcgttatttagatattgctgaatatatcgatgttatgcatatctcacataactggggaacaactgatgaattcgcaaatgttggctttggcgcaatgaagaagcaaccaccgttaaaagctaagttaaaattatatgaacaaatgatttcgaatgcacgtacattatctgaacaaggaatgtttgtatctgcggaaacaatgctcaatcaaagtacgctacctcatttacgaaaaatacatcaagaagtcgttcatgatatgaaatgtagcagacacgagattcaccctatgtatccagctgactttgcaagtcaattaaatgtgttaactctagcggaaatgaaaaagacaattcatgatatattggatttcagagatgaagatatttggatgttatttggtactttgcctgtttttccatgcttaaaagatgatgaagatcaaaagttactatcacgtttaagaactgctaaaaatgtaacgactagaaatgatccggatggacgtagtcgtttaaatgtcaatgtatttacaggtaatgtaattgtaactgatttcggagatgaaacaggtacaatttcgaatatacaaaaagataaattaacagatgtattcgataaatggttatcctctgatcttgctaaatcattaaattgtcattgttctgagtttagttgtttaggaccaaatgttcttgttaaaaatatgtactatccgaatatggattttaaagataatgagcgtcatatgcacaaacaaccacaaattatacaattttaaaaacgcttaattatgcggagaagcactttatcgataagtagtctccgcgtattttaatgctattacaaaataaaaaaccattaattgctggcagtactctacataaataataaaggtcatttaatagaactaatagtagtctataataaaagtgttaaattttaactaaaaacataaatgtgcataatcaaaaagacagattgtaggtggaatattcgaacataacagttcaattcatccttaacaacctgtctttatatttttagtctctaatatgttgcacttgagctaaatattcaattgtttgtttactttcaatgcgacgtgcttttcttcgttcaacacgttgtggtgctgtatcataaaaccatttttcaacatcatcttctggatatactccaggtacatgtttaggcttcccttcatcatctaacgcaacaaatgttaagtaacttaatgcagctaaatcatgcttgttattaaatacatcgtcaattctaatttgaacgaccacttccatcgaacttgtcccagcgtatgaaaccatcgctacgtattgtaatatgtcccctgttttaatcggctttaagaaatctactgagtctgtagatgcggtaactacttgcgcaccagcatgtttcatagctgtgattgctgcaatttcatcaatattagccatcaatgtaccaccaaacattgtatgatggtgattcgtatcttgagggaaaacttgtctatttttataacattttgattctgacatagatttcattggtctgtcctgatttgtcattattttatctcccaatctatactttaatcacgtatttgacctttaaatacatgtttcatttcctactcagcacctcaaaataacatttattaaaatgttgatgcccaatttccattttcaaatactagttcttttgaaccatcttcgaatatgccgtaaatagtcaaatcactactaccaatcatgaagtcgacatgtacgtttgaatcatttaatccgcttgcaatcttttcctcaacagtcatttccgttccaccttgaatattgaaggcgtaagcagatccaatcgctaaatgacatgctgcattttcatcaaataaagtattgtaaaaaatggtattacgatttgatatcggtgaatcatcaggtactaacgctacttcacctaatcttcttgaaccttcatcggtattgattaaatctttcaataccgcttcacctttttcagctgaaaaatcaataatttctccatctttaaacatcaatttaaattgatcgataatcgtgccattataacttaaaggtaatttattagtaacatatccatctactctatttcgatctggtgctgtaaatacttcttcagttggtatattagcaataaaagcttgttccttgccgttaacataacttgtagcatcttcccagatatgatttttcgctaaacctacagttaaatcagtaccttcagatacataatgcaacgcatggtaatttttttgctgtaacttttgagcgtaaacacttaaattagcgatgtgttggcgccaattttctactggatcattaccatctattcgtacaatttcaaatacttcatctatgaacttagcatatgcttcttcaataggtaactcagggtacacacgcttagcccaagctttagaagggaatgcagcaactacccatgcgaattgattcttttgaacgcgttccatatatcctttaaatgcacgtgaattttgctgttggaatgcttgcaattttttactgtcaattccattcgttaaatcagggtcttcactaattaatgctaaattcgcagcaccacgttttacataatccattctttcttcaacgtcgtacgatttaatagcattatttgcaaaaaattctactggttcatattcaaatttcaaacgatttaacgttggatcattatatgcaacgcgtacatctgatgcaccacaattataagcttcttcaacaattaaatgtgttaactctaatgtttcaactgaagctcttatgaaaacaggttgtttcggttgaacattcatacctacttttactaataattcagcatattgttgtaacttttgtttataatctttcaattcactcactcctagtcatgtcgcaattgccctaaagcatcagcgatagctgtcacttcactcggcgataatctatctcttgattgaacaaaatcatatatttcagttagttcttcttcgttggcatttttatatttatcaggatctaacaacccttgattaacaatatttaatttctctctaatagctaatactttctcttcatttgtcatagccttatagttcacctctaattatagttatgttatcaaagtatcacaatttaataaactttaatagaaatttatataatctgcttccttattgtttaaagtcgctttaaaatggggatataactacatagtttggaggaattataatggtagatgtagcatttgtctgtcttggcaacatatgtcgttctccaatggcagaagcaatcatgcgacaaagacttaaagacagaaatattaatgaaattaaagtatactctagaggtacgggggattggaacttaggtgaaccacctcacaaaggtacacaaaagattcttaacaaacacaatattcctttcgatggcatgattagtgaattatttgaggcaacagatgattttgattacattattgcaatggatcaaagcaatgttgataacattaaatctatcaatcctaatcttaagggccaattgttcaaactgttagaatttagtaatatggaagagagtgatgtgccagatccttactacactaataattttgaaggtgtatacgacatggtattatcatcttgtgataatttaatagactacatcgtaaaagatgcaaatttgaaagaggggtagttttttatggaaaataaatttgttcctggtattttaattggtgccgtaattggtggtgcaattagtttagctgataaatctacacgtcaagctttagttcaatcagttaaagatgcaaaaaatggtaaccgcactcgtaagccttctaaagtcagcaagattaaagacgaagttttatactggaaagatgttgttgaagaaattcgtcgtaataatcctgaattagaacgttcattaaaggatgcgaaagaaacatttgttaatagaaaaaatcaacgctaagatgattttgattttataaggtaatacttaacaatttggtgtacgcctttcgtagttatcattattaaatgataatacaatgattggccaaacttcattgtttcagtattgcctttgttttaattttaaatcaaaatagcctatgaaagatttatatcaattaatttctataatattatcatttttaaagcatatcattgtttagtttttttataattggataaatactaatagttactttataaaacattacatagagaaaggttaaggagtgcacatgtcgaaaaaggaccactcttcttcaaaataccttaattctgttaaggaagcgcaagaggagtcaaaaaagaaaaataaaagtaatcccaaaattgatgttgatcgtacatatattgaaccacaacaattccaatctaagaaacctaaaaaagatgatcaggttttcttcttatcaagattaaataaacctgcaaaatataagaaagactctaatttcttatcatatctcatctatcgcataggaaaagatgatgcctcaggactagcagcgcaaatgacttaccatttcgtacttgctatgttccctatgttgcttttcctattaacattattaccatttttcaatattaagcagagtcaaattactaatatgttaagtaatgcacccgctgaaacatctactctaattaagagtgtaattggtgatataactcaaaactccagtggtggcttattatctatcggtttgattttagcaatttggtcagcttcaaatggaatgactgcaattatgaattctttcaatgttgcttacgatgtagaagatagccgtaatggaatcgtattaaaactactaagtgttgtcttcactgtagttatgggcgttgtgtttgtagttgctctagcattaccaacgcttggttctgtaattagtcatttcctattcggtccacttggatttgacgaacaagtgaaatggatttttaatcttattagaattgtgttaccaatcattattatatttatcgtatttatcgtgttatattcggttgcacctaacgttaaaacgaagcttaagtcagtattaccaggtgcagtatttacttcaattatttggttagctggttcatttggttttggttggtatatttcaaattttggtaactattctaaaacatatggcagtatcgcgggtatcatcattttgttactatggttatatatcacaagttttattataattgtcggtgctgaaatcaatgcaatcattcatcagcgtagtgtaattaaaggtaaaacacctgaagaagcagcattagaacatgatgacaataataaaaatcattataatgagaacactaggtacgaatatgatgaaaatactaatgcaacacatcaacgtacgtatcatgttgatgaacatcctagtgatacctatccagaagatgataaaagtataaaagacaaaatcgttgataagcttaaaaaagactaaacaacaataaaacagaggttttcgctaatgattgcgaagacctctgttttttggtatctatttgatgttatattgtgattggcgttagtaacttttcttaattcgatatgaactattgaattaaattatgttggaatgcatagataacagcttgtgttctatcttgcacttctaacttacttaaaatgttactcacatgtgtcttaaccgttttaatagtaatatgcgatgcactagcaatttcttgatttgagtaacctttcgcaatcaataataatatttccatttctcgttctgtaagcatttcatataactctgcacgctttttcatacggttacgcattttcactaaaacttccggttcaaaaacagattctcctctagaagttttacgaactgcatcggcgatatcttttgcacttgttgtttttaaaatgtaactatcgacacctgcatctaatgcacgatatacctctttatcttcaataaaactagttaacattaatactttaatttgcggtaaatcttttttaatctgagtcgtcgcttctacaccatccatgtcttccataagtaaatccattaaaattaaatctggcttcaactcatgtgctttggcaattgcttctttaccagaagcgccttcaccaactacttcaatatcactttgcgttgatagataacttgaaattcctatacgtaccatttcatgatcatccacaaacaatactttaatcgtcatacgaatcctccttatttaaaggtgctttcacctcgatacgtgtacctgaatctggcaatgatacaatatggaacgttgcaccaatttccaaagctctttcacgcatatttttaagtccataactttgttctaatttttcatcaacattaaaacctttaccattgtcttgaattctcaacaataaataatcgtctttattaaacaattcgactgtcacttttgtaccgtttgaatgacgcaatgtattcgaaattgcttcctgtgtaattctgaacaaatgatcttcaatacctttaggtactttaaaatcttgtatttcatgcacaactttcattggcacttttttttgtaaatcaataactaaatctttaataccctcacctaaagatttgtcttttaaaccaagcggtcttaaatgtaacagcaaagcacgcatttctaactgcgaatcttgaaccattttctctaaaatcggaatttgttggtctaatggtggttctaacttcgtttctttgatagcagatagcatcatacttgccgcaaaaagttgctgactaacagaatcgtgaagttctcgtgctagtctttgacgttcatcttcaataatctttttaactttcacatcattaatattataattttcattggttaagttttgagttttaagtcgcaacttatgcaattcttgatttaaaggtacgagtgtatggtataaatctaacgtttcactatatatttctatattttgatcattaatgccaactgtttcgccttccattgaacgctcaatttgcgtcttaatccaatcattttgctgattgattttgtaagcgagtaccgaaccaacaataatacacaataatatgatgatgagatttaaaaataaaaagactggtattccgaatatttgtgtataaaacataccttgaaaatagatgatatttacaaaaactttatcgatgaacagaaatgcagctagcatgctatatactaagatgagcattgaaacaattgttctaatgtagtggttcatcgataaatcacctctacgtctccgataaacgttgatacgtagatattaactgtatagttatccggtttcatcatttcttcaatatgaatattgttattttcaactttatatgatttttcattcacgtaagtacttccataaaaagcagctacatgtaaattaatattgtaattaaccggcaatataacctgcactttacctaaaatgtgtctaacaacaatggtattattttccttaatatttgcagcttttgttaagtcaatatgtaggtcgccaattccatgttgaatttggacatcttcccacttatatacataaactggtgtacgttgctcaccaaaccacttttgtttaataaaagatggtgaagtcataacctcatccgtcgcaactactttttttggtttaaacttgtgtattaaataacgcacaataagtagtaataaaaagacgaacaagatgatgattgtatacttattagacaataatgtgaatgcaattaatagcgcgcctatccaaaacgccaaaaggccacgtattttatgaaaataaagatatcctacataaactaatacacatcccaataatagaacgagtaaaaagccaattttttcaaaaaatatgtagtaaaaattggcaataatcattaatgcagtaaaaatgatcaacatttgcgttgatatatatttgtgtgtcatgtttcgccgcctttctatgccacagcgttcatataatttattagatacgatgttttttctgttgctattttttcagttgaagtttgttgaatttgagtttcaatttgtgcataatatgcttcaactttattcaactctgatttaatattttcaatttcttgattattgatttctcttgcacattgaatttgaaatgcttcagcaatatcaatatatttattttctaatgttagcattagactgtcaattaacttgctaagttgttcttttttagtaattaaataacgcatataatcatctaaatttttcattttttcatctaacgttaaaaggtagtgcttgatattatttcttactgttgctctcaaaaactgttcaatataacgttcaacatagttcataactatcaccttttataataagttttaaaataccaaatgcgctatgtatcttcgttgatgtcgatgatatgtttgcttaaaaactactttattacaacatatttttgaaatgacgcattgattgtgttcttaattattataaaacagttccgaaaccaatatgaataggctccggaactaaatgatgttcatactttagtcttagtatatgttgaactattcttcttcaatctttgtcgttaaaatcggaccatccttagtcacgataaccgtatgctcaatttgagcaacaaaacttttatcgctcgtttcaaaagcccattcatttttaccttctgtaacaaatgatgcatttgatgagataaacggttcaatagctaataccataccttcagttaataatgttttgtcttttggatcaaagtaattaagtacatgtgctggtgcttcatgtaatgataaaccaacaccatgacctgttaagtttttaatgactttcaaatcattttgtctagctgtattatgcaccgctttaccaatgttacttaacttagtacccggttttacttttgcaattgcattctcaaatgccatcgttgctacgtcacatactttttgtttcattggatcgtctgattctccaacgacaaatgaaatgcctgtatctgcataatagccattcttcaaagccgatacatcaatatttactaaatctccttcacgaatgacacgcttacttggaatcccatgtgccacctcttcattcacactaatacacgtttgaccaggaaaattttcatcatgaattggcgcagaaatagcaccgtattcttcaaataactctttcgcaatattatcaagatctttcgtagtgatacctggtttggttgcagcttgcattgtattgcgcactttagcgcatatgtatccaatttcttttaacgcttgtaattcttcttctgtttttacaatcattttatcccgttccttttttatataattataacttattatagcaaaaattctttgatatactaaagatgttactttagtattttggaaagtgagtgggacatagtgtgataaagaaaaaatatttctttatcgttgtaccccaacctgcattgcctgtagaatttctttttcgaaattctctatgttggggccccgccaacctgcattgcctgtagaatttctttttcgaaattctctatgttggggccccgccaacctgcattacctgtagaatttctttttcgaaattctctatgttggggccccgccaacctgcattgtctgtagaaattggtgttccaatttctctgtgttggggcccacaccccaacttgcacattatcgtaagctgacttttcgtcagcttctgtgttggggccccggactataattgaaaaatgcttgttacatgtgcattttattttagtcaactactaacaatataacattgtggagcccagaactttgattaatgtatatgaaaatcaaagtaatgcttaagcatgattatttcaaatatttttcatacaggaacttttccaatgtacgatactattattataaagcgctcgctaagattttacgatgattagaggttaaaaaatgaacgatcaatggtataaacatttaattggtgccagaacaattaaaactggtattgccatttttttaacagctgtcttttgtatggcattagatttaacacctatctatgccattttaacagctgtagtcacaattgaaccaactgccaaggcatcacttattaaaggttatcgtagattacctgctacggtaattggtgcaggctttgcagtattatttacatatttattcggtgatcaatcaccttttacatatgcattgagtgcgactttcacgattctattctgtacaaaactcaaattgcaagttggtacgaatgttgctgtactaacatcattagctatgattccaggtattcatgatgcctacatattcaactttttgtctcgaacattgacggcgattattggactcgtgacatcaggtttaattaacttcatggtatttccacctaagtattatggtcaggtcgaagaaaaattaagtaagacagatgccttgatgtataaattattttacaatcgctgccaagaacttatcttatcaagactgcaatctgataaaagcgaaaaagcatataaaaatattttcaatttaaacaatcaagttgaaacgttaataagttatcaacgtgatgaattaagctatcataagaaaaaagaatgtgattggaaattactcaaccaattaactaaacgtgcatatacgaatcgtttgtttatcactcatttatcaaatatcatttacttgcctaaaaatactcgtgttaacttttcaggtgacgaaaaaatggcattgctaaaaattagtagtagcatcaaagatattttttatgatggttcatttaagagagaagatgattctgtagaaactttacgttcgacaataaaagctcttgaaattagtggtgaaaatcaaattaaaagtcatatactgtatgaagttttaatgatttatcgactgctagacagcagatatgcataatttaagtaccttatgctaattggcaccattacttataatcttactttattcgtatatagcatgtccctttttaaaattacaagcataaatattcagactcaaatatagccacacgcctaaactacggagggatgtggctgtcttttttgattgtaattgtgtatcaggtttaaatcattaatgtaacgagactaattcattaataaatttagtaaaacctgatttagcaacatttatccttaatgaaataccagattctgttgccatgtttgaatgccttaaaccagaatcaaaatcaatataaatacaaagcagttcttgattaaaatcaataatcgtaaaatgtaaatcaggttctataaaatatatttcggtaactggattatcgtattcaatatgttttaaattgtcaatgtcactatcaaaaagtgcaaattcaaattcaacttcttgatcttcgaaagttgcactagtgtcgaaataataaatttcattatcttcttcgataactacatcttttaaaataaatgttatcgatgttttgctatgtaaataagatgcatcttttaaaatcactttagtaggcttcatcgtcaaattcctttcatctttcattttttcatgttgcataattaccattactattgataattctacggtagatactcattgtataataattattcactagaacaaaaaacacacatcaatttggttgtttccatccaaaataatgtgtgtgtttatacatatatgattaattactaaacttcatcgtttatcaattttaaatccattgatacgatgttcagagttaacgagatttcttctgtctatttgctctgtctattaatacttgtttcgcttgcttttccgcttcattatctatttctttaggctcaaacggaatacccttacgttcacaagctttttctaacagataatcagtgatttcgtaatttttaggtaaaattggtccgtgtaaataagtacctaataagtttttataatgaatgccttcttttttatcttcatcattattaccataaccaaaagtaacatgaccaagtgtaccgaaattatgatatgttctaccaccatgattttcaaaacctacaatagttccaaaagtatcactttcgataacaatatctcctgttaatcggtttgtctttgattcagtataaaaatctaaaatacctaacccttctaattctgtaccatcaggcgtgatatattttttccctaaaaattgatagcctccacaaatcgttaatcccggcataccatcttcaatcgcttctttaagtggtgtcttaattttacttaattcttttgttgctaatgcttgttctctatcacttccaccaccgataaagaaaatatcacattcatcaaaggtaataccttctgtttcattgatttctacgacattaactttaatatttcgtttttttgcacgttgtcttaaagcaataatatttcctatatcactgtataaattcaatttatctgacataaaatgataaatagtcaattcatgcatattatgattgacctccttcaaacgaacggtttaattgttcaagcataggcgctaatgatgtatagtttggtattgcaactgtgaaacctttataatccatagtctttgccgttgctttataaatatcacgctcaactataattggtacttcaacctctgctaacttcaatcgcaattgaagttcttctgctcgtgtacctgtcacgatgatagcttcaatttgttgcttagataatttttcgaaatctgcatcataaatccatgaagtatctcgaccatctgcagcgttatcatttagtgaaataacatacactttttcgccttctaattgttcaccaactgataaacttgcattcattcctgcagggtttttagctaaattgatcatcgcttctttttgttcttttttaaagtactgcatacgaccattgtctgatgtatacgtttcaaagccatttttaattgcttgttcatttaaccctagctctcttaaaactgtatatgctgctaacgcgttataagcgttaaagtcacctgctattttcatatcatatttttcatcattaatatttaaatgtaaaaacggtgccacatcaaaacttgatatttcatattttgcttgctctcgtttgaaaccacactgacagtgataatgaccaatttgattataatgaatataatcgtattgcaataagcgaccacagtttggacaatatctactttcattcatcgtactttgttcaaattcatgggcatgtgctttcatgccatagtacacaatcgtatcacttgcgattttcaaacgactcacaaatggatcatcagcattcagcaataatttgatgcctttattactaattgtctctgcaatgttattaaccataatatcaatttcaccgaagcgatccatttgatctctaaagaaattagtaaataccatcattgaaggtgtaacttcttttaacacacgtggaatcgaaccttcatcaatttcgattaccgcaattttagtcttaggtgttgattgcatgatgaatgcagaagttatacctgcagccatattagcaccttcattattgtgtataatttgaatattatttgcttttaaagtatgtccaattaagtttgaagtcgttgttttaccatttgttccactgataaatacaatatcatcaacttgctctgctaattttcttaatatatctatatccacttttctagcaatttgtccaggtaaatctgttcctcttttacctactgctctacttgctttacgcgccaattttgctagatggattgccgtccactgtctcatgtgtttcctcctcaaatttccactcgcatcattataacatgacaaggcaacttcaaaaaagtttctcaatcacaaattgatacagcgtttctaaattataatcattctcatttagataattaaaaatgatatttattctcaattaaatctcgctaaatgatacattttctcaattagagtgctaaaatcgggtattaaattataattattattatttacaattgagaatgagtttgttatactaagtttaattcatagtaattttaatttacaaataagaggtgtatcaaaatgttaagtaaaaatttattagaagcattaaatgatcaaatgaaccacgagtactttgcagcgcacgcatatatggcaatggcagcatactgtgataaagaatcgtacgaaggatttgcaaacttcttcattcaacaagctaaagaagaacgtttccatggacaaaagatttataactatattaacgacagaggtgcacatgcagaattcagagcagtttcagcaccaaaaattgacttttcaagcatactagaaactttcaaagacagtttaactcaagaacaagaagtgacaagacgtttctataacttatctgaaatcgctcgtcaagataaagattatgcaactatctcattcttaaactggttcttagatgaacaagtcgaagaagaatcaatgtttgaaactcacatcaattatttaactcgtatcggcgatgacagcaatgcattatatctttacgaaaaagaacttggcgctcgtacattcgacgaagaataattaaacatcactacaatagacagataaatatcatacgacatgatagacatttgggtcacttacaataacccaatgtctatattattttgctttacggagatctttagatttattttctaaatcattgatctgcgtttttttattttcaaggctaattattgtatttttagtcatttattttttaaactactaatgttaataactctaaatttaatattgaattaatttgaccgattttaaagcatatcatcatttactttttaatcagagttacatccaaatgatagatttcacgttataccttcacgtataatattatgtatcatttgtaagcaaatgactaaaaagtctattaatatatacatttaattaattgaaaggattgactacatgatacaagatgcgtttgttgcacttgattttgaaacagcaaatggtaaacgtacaagtatttgttctgtcggaatggttaaagtcattgatagtcaaataacagaaacatttcatactcttgtgaatccgcaagactatttttcacaacaaaatattaaagttcatggcatacaaccagaagatgttgaaaatgcacctacgtttgactacgtatttccatatatgatgcaatttattgcagatttacctgttgtcgcacataacgcggcatttgatatgaacgtcttacatcaaagtattcaaaatattggtttaccaactccaaatttaacttacttttgtagttatcaacttgctaaaagaaccgttgattcgtatcgatacggtttaaaacatatgatggagttttatcaattagattttcatggtcatcatgatgcattgaatgatgccaaagcatgtgcaatgattacttttaggctactgaaaaattatgaaaatttaacgtatgtaactaatatttatggtaaaaatctaaaagataaaggctaggactaaataaaatgctccattcaaagtaagcattgtaaaaatgtaaactttaaatggagctttattttatataaagtcatatatcgtcatatttttataagttgattgttctaaattacctacagtgacaccaataagtcgaattggtacatcagggtcttttaaatcgttataaagtaaatatgcaatattataaatatcttcttcagaactaaccgaatctcttaaactcatctgtttagataacgtttcaaattgataagttttaattttaactgttacagttttagctgacttctgtaatttatttagacgttcagctgttttacctgacaactcccatacttttcttaaaatctcttcatcatcattcacgtctgttgcaaatgtgcgttcagtccctactgattttcttactcttgatgatttcacttcactatggtcaataccgcgtgccttgttatataaaccccgacctctttttccaaacaaacgtattaattcaaattccgttttctcatataaatctctaccgttaaaaataccattatcgtgcattacttttttggaagctttacctacgcctggaaaatctccaatatccaatgtcatcaaaatatcatggacattttgataatcaatcacagtcataccatcaggtttattcataccactcgctaatttagctaaaaatttgttgtaagaaacacctgcagatgctgttaaatgtgtctgctctagaatatcttttctaatatactgagcaattttcgaagcaggaaggtctggtctcactaattctgtaatatctaaatacgcttcatccaatgacatcggttctaccttatctgtataacttcggaaaatagacataatctgtgcagatgtttctcggtaagcaccaaaattacttgtgacaaagtatccatttggacataatttatgcgcttgtgacataggcattgctgaatggacgccgtattttcgtgcttcataagatgccgtagagacaacacccctactacttgctttaccaccaacaatgactggtttccctttcaatttggggttatctctcatttcgacttgtgcaaaaaaatagtccatatctatatgaataattcgtctctcagtcaagtgctcacctccctactaatttttacttttagaacgcacaaaaatatctcaacataattatacgctgtgtgcgatttttttacataaatcttgcacttagcgataactatattgagataactacaagttgttataaaatcaattgctatttaagcatgatgatgaagacgattgagtaagaaaacataggtaatctgaaataattcaagcaaattcattttgttggtatcatcatattaaaatttattattgagtcggcttttgatgatacaaataaatactatcttcatcttgttgaacatatttaaaactactagatattgttaatgcaacaagcagaatatctataaagcaataagcggtatgcatactaaacataaaaataagtgatgaataaccaaataccttaattaaaataagcaagccagtacttaataggattagtggtgacagcataataattgagaattgccatttgttgaagcaagcatctgctgtttggaataagattctgtctttttttatattaaacataggtttgctatcttttttaaataaaagaaataatgctctatggataagttcatgtaaaatcaataaaataatgaatccagcaaacccatatacaagattgatgatgatattttgatcgacaaccgctgtgacacctaacgcccacttatacgtaaataaaatcacgaataacgcaataacaagttgcaagataataaaccttcgcatttgaaaattatttgtcgttaaatcaattttatgcattaccaaccctcccgatcatgacattcttattcttctttaaatatagtatacaatgtcacatttaatttaaaaagttcatatcaagaaagtaaattggctgtaataaaattttaatatacgacttctttcttcacttattaaggcgaaattttatctcaaatcatgtgcgctatttcaaattgaataatgccactgtctcaacatgtgttgtttgtggaaacatatctaccggtgttacctcttcaagttgatatttttcagctaataataatgcatcacgttgctgtgttgcgggattacatgaaatatagacaatacgcttaggttctaatgtaagcaaagtctgaataaacgtttcgtcacagccctttcttggcggatcaaccattacaacatctggtttaatcccttgtgctttccattgtaaaataacttcttcagctttcccacagacaaaagttgtattattacattggtttatagtcgcattttgttgtgcgtcttcaattgcagaaggtactacttcaacaccgtatacatgttttgcatgtggtgccatatatagccctattgttccaataccacaataggtatctaatacaacttcattacctgtcaattgcgcatactcaattgctttattatataatttctctgtttgttcagaattaatttggtagaatgactgatcacttattttaaatgtactatctgttaattgatcaataattgtatctttaccatatagcgttatagattgacgtcccataataacattagagtggctatcattaatgttttgtttaatacttgtcacattaggaaatgcatctaatatcttctcaacaacagcatttttttgtggccactttttaccattagttacaaaaataatcatcatttcgtctgtatgatatcctgttcttacaaccaaatgtctcattaaaccttttttcaattgttcttgataaatacttacatttaaatcttttaaaatagatttaacttcattcatcacttcttgatgttgtgaatcttgtattaaacaactttccatgtcaataatgtcatggcttctttgacgataaaagcccataataacttcattctgttcattctcaccaactggaatctgggacttgtttcgatatctccaaggatctgtcatgccaactgtatcgttaatcttagaattatcaaaatgtgcttttcgctgaaacaaattaatcacttgttcttttttcatttcaagttgtgcttcgtatgataagtgttgaagttggcacccaccacaacgttcataatatatacatggcggtgcaacacgattctcacttctcgtatttatattaagcaacttacctatcgcaaagttcttttttactttgataattttatattcaatttgttcattaattaaagcttgtggtatgaaaataggaaagcgatctatttttacgacaccatgaccttcatgcgttaaatcaacaactgttcccgttttaatgtcatttttagctattgcttgcaaaattttacctccaaaatgaacaggttaggaacaaaattatgcgcttcctaacctgccattatatatttcactacttctgtttattcttcgattaaattgccatcaacatgatcattatttattaactcttcatttacaatatcattaggtgcaaagacatctatatgacgttctagatttaagaaattcgctggtaatttaccaccatattctccatctacatttagttgtaagtctgtgaatgatgaaatattaattgcctttgctttttcataaataactttaggatgcttagtatgttctcctcttgaagctaaagtcataatatgaccaagttctgcaaggtttgatttttcaactataattaacgtaaaatagccgtcgtctaacttagcgtccggcactaatttttcaaatcctgccattgaatttgttaaacctaaaaagaataataatgcttctccttggaaaacattaccatcatattcaattcttaaatctacagctttcatttgaggtaacatttcgaaacctttgatgtaataagcaaatggaccaacaatagatttcaatttactcggtgtttcataagagacttgcgtcaattgtccgcctgcagctaaattaataaagtatcgattattcattttaccaatatctactttagtagaatgaccttcaatgatgacatcaagtgcccccatgatgtcattaggtatatgcaatgcacgtccaaagtcattaacagtacccataggaatgacacctagcttaggacgattaggcttttctgcgataccattaactacttcatttaatgttccgtcaccacctgcagcgattaatacatcataattttcatgcatagctctttctgcttcaagtgtggcatcacctattttctcggttgcatatgcactcgtttcatatcccgctttttctaattttattaaggcatcaggtaattctcttttaaattgctctttacctgatgtcgggttataaatgattctagcacgtttcctcatatcttatccctctacttaaaattcatttattttaacttcatcttggtttcgtctaatagggagtgggacagaaataatatttaacaaaatttatttcgttctaccccaacttacattgtctttagaatttccttttgaaattctctttgttggggccccactagaattgaaaaaagcttcttacaagcgtattttctttcagtcaactactgccaatgtagcattgtagtgcctaggatattgaatttatgacccaggctcagtcttatttcatcattcttaatatcgttaaagaccaacttgtaacttaaacaaatactatctcaatatgtacaaaggttgttatttattcagcaatttttgccgttcttcgttatatagacttcgtcagttatgctattttacctttaaaatgatgttgtaaatataatgttgtctttatacaaaaatgttttatacctttttattatacagtttgccttaatataattaaagctaacgcattaataaaattaatatttttaccattaacatgtacaatgaataaagttaaaagtaatatgacttctatagatataaataaaccctcgattgcatctaagtcagcaaccaagggttcattgttatatcatcatagtctgatgaatctaattatcttttatctaattcttgttttaatagttgatttactaattgtggattagcttgacctttagacgctttcataatttgaccaactaagaagcccatagctttgcctttaccatttttgtaatcttcaactgattgttcgttattgtctaatgcttcatttacaaattttagaagtgttgcttcatcagaaatttgaactaagccattatcttccataatctgtttagcattaccacctttagctgctaactctgggaagactttcttcgcaattttactgctcattgttccgtcttcgataagtttaatcatacctgctaaattttctggtgttaatttagtatctaataattctacttgatttttatttaaatattcgtttacgccacccattaaccagttagatgttaatttaacatctgcaccgtgttcaattgttgattcaaagaaatctgacatttctttagtcaatgttaatacgtgtgcatcgtatgcaggtaaacctaattcatttacatacttagctttacgctcatctggtaattcaggaattgtctgacgaacacgctctttccaagcatcatcaatatataaaggtacgatgtcaggctctgggaagtaacggtaatcatcagaaccttctttaacacgcattaaaattgttttacctgtagattcatcaaatcgacgtgtttcttgtccgatttctccaccatttaacaattcttcttcttggcgtttttcttcatattctaaacctttacgtacatagttaaatgagtttaagtttttcaattcggctttagtaccaaatttttcttgaccatatggacgcaaagagatgttagcatcacaacgtaaagatccttcttccatcttaacgtctgatacaccagtgtattgaataattgaacgtaatttttctaaatacgcatatgcttctttaggtgaacgaatatctggttcagatacgatttcaattagcggtgtaccttgacggttcaagtcaactaatgaatactcacctttatgtgttgacttaccagcatcttcttccatgtgaagacgagtaataccgattcgttttgtttcaccgtcgacttcgatatcgatatatccattttcaccaattggttgatcaaattgagaaatttgatatgcctttggattatctggatagaaatagttcttacggtcaaacttagattctgttgcgatttccatatttagtgccattgcagcacgcattgcccagtctactgcacgcttattaacaactggtaagacacctggatatgctaagtcgataacatttgtatttgagttaggttctgctccaaaatgcgctggtgatggagaaaacatttttgagtccgtttttaactctacgtgaacttcaagtcctataactgtttcaaaatgcatgatttccactccttataatttttcataaacgtcatgtaaattgtattgtgtttcatattgataagcgacacgatataacgttttttcatcgaatggtttaccaatgaactgtaaaccgattggtcggccatttgattgtccacaaggaacagaaataccaggtaatccagctaagtttactggtgttgttaataaatcattggcatacattgtcaatggatcatcaatttcttcacctaaattaaacgcagttgtaggcgctgttggaccaactactacatcataattttcgaatactttatcaaagtcatttttaatcaatgttctaactttttgagattttttatagtaagcatcgtagtaacctgaacttaatgcaaatgtacctaagaaaatacgacgttttacttctttaccaaaaccttcagatcttgacattttatataattcttctaatgaatgagcttctttagaatgataaccataacgaattccgtcaaaacgagaaaggtttgacgaagcttctgatgatgcaatcacgtaatatgatggaataccaaatttagtatttggcaatgatacttcctcaacgacagcacctaaagattttaaagtttctacagcgttttgaactgcttcttttacgtcatcagctacaccttcacctaagtattctttaggtaatgcaacttttaatcctttaatatctttaccaatatcagatgtaaagtctacatcatcaacaggtgcacttgtagagtcattaacatctgcaccagaaatggcttctaatacgattgcattatcttttacatttcgagtcaatggaccaatttggtctaatgaagatgcaaatgcaactaatccaaatcgagatacacgaccgtatgttggtttcataccgacaacgccacaatatgcagccggttgtctaattgaaccacctgtgtctgaacctaagctaaatggtactaagccagctgcaactgctgctgcagatccacctgatgaaccacctggtactgctttatggtcaaatgggttaactgtttttttgaaataagatgtttctgttgaaccacccattgcaaactcatccatatttaatttaccgattaaaacggcattctcattatgtagtttttccattacagtagattcgtaaattggcacaaaaccttctaacattttacttgcacatgttgtttctaatccgtttgtaataatgttatcttttatacccattggaataccaaataatttgccatccatttggtcttttgcttgtaattcatccaattcttgcgcttttttaattgcattttctttatccagcgctagaaaagacttaattgttggatcagtctcttcaattgcatcatatatatctttaacaacatcagatggtttgatttttttgtcttttattaaagttaataaattctcaaccgattcgtagcgaatgctcatcttacgcgtcctcctcattcatgattgtaggcactttaaattgtccatcttctgtttctttggcatttttcaaagctaattcttgcggaatacctttaattgctttatcttcacgtaaaacgttttgtaaatctaaaacgtgatatgtaggttcaacgccttctgtatcagcgctatcattttgttttgcaaaatctaaaatgctttctaatgtgttggccatttcttccgtttcttcaggagaaatttgaagtcttgcaagattcgcgatatgctcaacttcttcacgtgttacttttgtcattaataaaagcctcctttaagtcattcatcactaaattgtatcaaatttccaattaaaaatctaagtatttatgaggtactactttaatttcatataaactgtataaacattatcattcgtttaccaaatcattttttatgaaaacaacaccctcttaataatagacaacccaattcaatattatgattatgcaattttaattataaaaatttgcctatatctaaaaaatacgaaagcgctttctatattggtatacaagtatttcaaaaagaataaatttaattttcctacttttctaaacatttatctttatgtataatgttttcaagtaactaaattataaattaaataaagggagtgtttatcatgcttacaatggggacagcattaagtcaacaagtagatgccaattggcaaacttatattatgattgccgtctacttcttgatactaatcgttattggcttttacggttacaagcaagcaactggtaacctgagcgagtacatgttaggtggacgtagtatcggtccgtatattactgcattatcagctggagcttcagatatgagtggctggatgattatgggtttaccaggctctgtctatagtactggtctttcggcaatgtggattacaatcggcttaacattaggcgcttatataaattactttgttgttgctcctagacttcgtgtttataccgaattagctggagatgcaattacattaccagatttctttaaaaatcgtttaaacgataaaaataatgtgttaaagattatttctggattgattatcgtagtattctttacattatatacacattctggtttcgtatctggtggtaaattatttgaaagtgcttttggattagattatcatttcggtttaatattagttgctttcattgtcattttctatactttctttggtggatatttagctgtatcaattacagatttcttccaaggtgtcattatgttaattgcgatggttatggtccctattgttgctatgatgaatttaaacggctggggaacgtttcatgatgtagcagctatgaaacctacaaatttaaatttatttaaagggttatcatttataggaattatctctctattttcatggggattaggttatttcggtcaacctcatatcattgtaaggtttatgtctattaaatcacacaagatgctacctaaagctagacgtttaggtattagctggatggctgttggtttattaggcgctgtggctgttggtttaacaggtattgcattcgtacctgcttatcatattaaactagaagatcctgagacattattcatcgtgatgagtcaagtacttttccatcctcttgtaggcggttttttactagcagcgattttagcagcaattatgagcacgatttcttcacaattacttgtaacatctagttctttaacggaagacttttataaattaattcgtggtgaagaaaaagctaaaacgcaccaaaaagaatttgttatgattggaagattatctgtattagttgtagcaattgttgctatcgcgattgcatggaatccaaacgacacaattctaaacttagtaggtaatgcttgggccggatttggtgcatcgttcagtccacttgtgctatttgcactttactggaaaggtttgacacgtgccggtgctgtaagtggaatggtttcaggtgctttagtcgttatagtttggattgcatggattaaaccattggcacatatcaatgaaatattcggcttatatgaaattattcctggatttattgtaagtgtaatcgttacatatgttgtaagtaaacttactaaaaaacctggtgcatttgttgaaattgacttaaataaagtccgcgacatcgttagagaaaaataattcataagtcttaacaaattaaaaaggtactaatgttaatcaaaattctgactaacattggtacctttttattatctttaatttacaattaattactgtaaatatgaacttgtggttctttatcatcttttgtcttactaattaaagcacgtggttggttaccatctttaatacgaatttcatagttatcgattttatcgaaatatttattcgcttgttcagtaacgtactgtgtaataccaattgtttcagcttgtccatagtaatcgattggtaaatctactactaatcgttgtggctttttatcaacaaatttaactttccctactgcttgtgtgaaattagaaaaatatgattgcaaattatcgttaaattgcttgaaattattatttaaattttcatcataatctgctgctgttgaagaaggtaataaagctgatttttcattgatattatgccattcattaagctttgtttgactcttttctgcagtcgcttgagtgataaattcacctggtgtgattgaatcttcacttgattgcttataaattgcaaaatgaattggtatatcttttaaatcatcattttcacgtaaccttgataatatctcactagccatttgtttaccttgctttttaacttcgctatcatctagttttttactaaaagtcggtccatctttttcttttttatagtaataaacactattcatagctaaaccaatcgtcatacctttaatattcttaccttttgtatctccaccaccataaaaatcttgttctaaaatgttagataaataggctggtgatttttctgcaatcttttcaggatctgtttcaccttcgtgtgatggattaagtcctaaattttcattcgctttcttgtcttttttatctttttcagacattttatcgatttcacgttttgtatacttaggatttaaataggcattaattgttttcttatccaaaaattgaccatcttgatacaaatatttgtctgttggaaacacttctttacttaagttcaacaaaccatcttcaaagtcgccgccattataactatttgccatgttatcttgtaaaagtcctcttgcctggctttctttaaatggtaacaatgtacgatagttatcaccttgtacatttttatccgtagcaatttcttttacttgatttgaactattgttatgtttttgattatcttttccagcctggtcatccttatggttaccacaagcagcgagtataaagatagctgtaatcaataatactaatgtacgcttcatcgacatacccctctaactatttaattcattttgcttatctacaaattgttgctctgtccaaatttcaatacctaaactttgtgcttttgttaattttgaacctgcatcttcaccagcaataacgacatctgtatttttagtaacactacttgtaactttagcaccttgtgatgtaagccatttagatgcttcattgcgtgtcattttatgtagcttaccagtcagtactatcgttttaccactaaattcaggatgtccttcaatatctgatgttttgatacctttataaatcatattaacatgtttatcttttaatttttgaattaaagcacgaatatcttcattttctaaataagtaactacagattgtgctactttatcacctatatcatgaatttctactaattccgcttcagttaccgttagtaatcgatctatcgtttcatatttttctgctaacacttggctcgctttaacacctaaatgccttatacctaaaccaaataataaattttctaaagagttgtccttagcttgttgaatggcagctaataaattatcaacttttttctgccccattctgtctaaaggtaataaatcttcttctgttaaatagaaaatatcagcaacatctttaattaattcgctttgataaagctgttgaataattttagtgcctaagccatcaatattcatggcttgtcttgatacaaagtgaatcaatccttcaacaagttgtgcttggcattttggattaatgcaacgaagtgctacttcgccttcaatacgtactaattcatgtccacaacttggacaatgggttggcatatgatatgtgacagcatcctcaggtctacgttctggaatactacgtacaacttcaggtatgatgtcacctgcttttttcactacaacactatcaccaattcgaatatctctgtcatgaattaaatcttcattgtgcaaagatgctcttgatacagttgtaccagctacttttactggttctaaaatagcagtaggtgtgactacacccgtacgtccaatacttaattcaatatctaataatttagttactacttcctcagctggaaatttataagcaatggcccaccttggtgatttttgtgtgaatcccatttcgtcctgttgatctaaatcattaactttaataacaatcccatcaatatcataaggtaatgactctctttggcttgtccatttttcaatatactctaaaacgccatcgatattatttacacgcgctctatttttattcgttgtaaaacctaatttatctaactcatctaatgcttcactttgcgaacgcgcattgaaatcggtgaaatcattgacactatatataaatacgcttagctttcgttttgccgttaatttagaatctaactgtcttaatgaccccgcagctgcgtttcttggatttgcaaataactgctcatcatttttttctttttcttcatttaatcgtaaaaatgaacgtctcggcatatatgcttcaccacgaacttctacatttaatggttctttcattttcaaaggtatcgcatgaattgtttttaaattttcggtaatatcttcacctgttgttccatcaccacgtgttaaaccttgaacgaagtatccatcaacatatttcaatgatactgctaagccatcaatttttaattcgcacatatattcaacgttgccaatttgttcacgtatgcgttggtcgaattttctcaaatcatcctcattaaatgcattccctaaacttaacattggcgtgtcatggttgattttattgaaagaggcttgggcttcaccaccaactctaactgttggagaatctacagtcttatactcaggatgctcctcttctattttaatcagttcatgaagtaatttgtcatattcactatctggtacagatggattatcctctacatagtattcataactgtattgatttaataaatcatgtaactcgttcacacgagacgataaatcagccatcccttaatcctcctttttttcaattggtgcaaattgcgctaacaaacgttttggcccttgtgatttaaagataatatctagttcgattgagccatttttctcgtttacattactcaccatgccttctccccaggctttatgcattactttgtcacctacattccaatcagatgacgatacttgttttttcgttgacgttgttcgttgactaaatccacgtttagcaaaaggttttgccttaggttgtatcgtttgtcgtttgccacttgaatgattttctaatagtgattctggaatttcctttaaaaatctagatggcatatttgactgagggcgaccaaataacattcttgatgtcgcatgagtgatgtataacacctcttcagcccttgtgattgctacataacaaattcgacgttcttcttgcatttcatgatcatcttcactcttaatcgctctaatatgtgggaataaagattcttccatccccattataaagacgattggaaattcaaggcccttagccgagtgcatcgtcattagtgttacgccattttcagtatctgcctcatcaatatcagctactaacgataaatccgttaaaaagttaattaatgactgttcttctaatggggtattttcctcatagtcttttggtactgacataaattcatcgatgttttctaatctacttcgagattctagtgtattttcacgttcaagcatttctcggtagccagacttttgtaatacttcatcaactatttcatgaatttctaaaaattcttgttcttttatcaagctttggattaactcgtaaaaattaagacactcttgtgtcactttttttgacaatccgataaaatcagcttctccaagtgcatcaaacatactgatattgttttgaagtgcatagttttgaactttttcaacagatgaaggacctacacctctttttggaacattaataatacgttgcaaactaatgtcatcattactattggcaattatacgcaaataacttaataaatctttgatttctttacgatcatagaacttttgtccaccaaccattgtatatggcatattagatttcatgaatgtttcctcaagtacacgtgattgtgcatttgttctatataaaattgccatatcttgatatttcttaccattacgttgatgcttcataatttctcgtattacaaattccgcttcgtcacgttctgtcattgcttcatagtaatgaattttctcaccattcgtatttgcagtccacagtccttttggcttacgttcagaattatttttaatcacttcgttagccgcatttaaaatcgttttcgtcgaacgataattttgctctaaaaagattgtattcgcttctgggtagtctttttcaaatgataagatattttgaatatcagcaccacgccaaccataaattgactgatctgagtcacctacaacacataagtttttaaacttacttgctaataatttaactaatgtgtattgtgctttattggtatcttgatactcatctacatgaatatattggaatttgttctgataatattctagaacttctggtacacgctcaaataagttaatagttgtcataataaggtcatcaaaatctaacgcttcattacgtgacaattggcgttgatatccactataaaccgttgctaccatttgcgagtgataatctgtggcttctttttgagcatctgcaggtgttttaagttcatttttcaaattactgatcgcaccgataaacatacgaggttcaaattttttactatcaatattttcattttttaagacgtctttaataacagatttttggtctgtaggatcaattatcgtaaaattgcgttctataccaattcgatctgcatcacgacgtaaaatacgaacacacattgagtggaatgttgacatccaaataacttctgcttgatcacctactaatttttgaacacgttctttcatttctcttgcagctttatttgtaaaagtaatagccaaaacattgtatggtgagacatctttttcgtctaataaataagcaattctatgtgttaaaacacgtgtcttccctgaaccagcacctgccataattaacaatggtccttctgttgtctttacagcttcactttgctctgtattcatatgatttaataacgcattcatttactagactcctttatttttactgtttttaaagcttttttaatatctttataaataatatcaccgacgataattgtatctgcaatagctgccatctctgtcgcttgttgttctgaggaaataccgccaccataaaaaagttgcgtttctgatagatgttctgagacagcttgaacctttgatacgtcgccataaatgccactatactctatatacataaccggtaatcgatacatatgattgaccatttgggcatatgcttctaaatcttctattgttaaatctgtatttgctttggtatgttttgccactttgctatcagcattgcacacgacataaccttcaaatattacttcttcaaaatctatactatgtccatatgttttaagcgcttctaataatgtaccattgtgaaatgcaacatctgtactgttcagtactgtaggtacaaaataaaaatcaaaaccaggcattacactttcgatgtttgatatttcaagtactaaaggcaatgggtatcttcttaccctgctcattaaatgaatgacattatcttcagtaacgtcatcagttccaccaatcataattgcatctgtttgagacatacaaatcgcatctaaatcatcatctgaaatatgtttagctgggtctaatttaaaaatatggcgccattttttaatgtcatacattttccgaaactccttttttaacatacatatgattatagcatttttaagtgtcgagttctaaagacttaatatgaaatttaagttcttttactctgtaaattttttcgtgaaaaaacaatgattatctaccttattagtgcagatagataaccattgtttatcgttcatttattattcatttgtttcaatattcatacgatctaaaatcattgtataagcatcattaccccattgtaatgaacgcttcactctagaaatcgttgcagtcgatgctccagattcttgttcaatcgttgcataggtataaccttgcttaatcattttagcaacttgtaatctttgagacagtgattgaatttcatttacagtacacaaatcatcgaaaaattggtaacattcttctctattttctaacgttagtattgcatcaaacaattcatctaacgctgcacctcgtaatttttcaatttgcatatcgaaacaacccctataattttattctttatgtcattttaacgcattaacctattaaagtgtagcgatttatattttattaaatctgaatcgttactttttttaattttatgctaatccagcgcgttcgaaaatagtgtcaacttgattcaaatgatgtttaggatcgaaacattcatccaattcttcttttgttaaaacacttgtaatagactcatcttgttcgattaattcacggaaaggtgttttcgtttcccaagatatcatcgcttttggttgtactttgtcgtatgcttcttcacgaaccatacctttattaattaatgctaataagacacgttgtgagaaaatcagaccaaatgttttatctatattattacgcatattatcttcaaatacagttaaacggtccacaatattcgtgaaacgattcaatgcataatctagtgctattgtaacatctggtaacataatacgctcagctgaagaatgagaaatatctctttcatgccataatggcacattctcataagctgtagtaatataaccacgaattactcttgaaatacctgtgatattttcagaaccaattggatttcgtttatgaggcattgcagatgatcctttttgaccttttgcaaatgcttcttcaacttctcttgtttcggttttttgaaggttacgaatttcaacggcaaatttttctagtgacgtcgcgattaatgctaatgtcgcaatatagtatgcatgtcgatcacgttgcaatgtttgcgttgatacaggcgctgtgccaatacctaaatgtttacacacataactttctatttcagggggaatgttagcaaaagtacctactgcaccactcattttccctacttcaatttcttctcttacttgtttgaaacgttgtaagttacgttgcatttccgtgtaccacaatgccattttgacaccaaatgtagttggttctgcatgcactccatgtgtacgtcccatcatcaatgtatatttataattttttgctttttcagctaaaacgtcgataaatctttctaaatctttttcaataatgtcatttgcttgtttaataacgaaacttaaagctgtatctacaacatcagtagaagttaaaccataatgtacccacttacgttcttcacctagcgtttcagaaacttgtctagtaaaggctacaacatcatggcgcgtttcttgttcaatttcttgtgcacgttcgacatttacctttgcgttctgacgaattttttgtacgtcagctttcggtatatgtcctaattcactccatgcctcacatgctaaaatttccacttctaaccatgcttcatagcgattttgatcagtccaaatattagacatttcttctctagaataacgttcaatcatttttttaactcctatcgtatgtatactcgaattttcaaaaacagaacatttttaataaaaataaataaaaagttcgtttttaactctactcttcacagtttaacagaattggttataaatgtataaaaaatttccgtatattctcattctattttattttttacattaatacaattatctatggcagattaatactgatttctaattgtaaatgttcgcaacactttaatctaattggtatttataatgatccattaagaatatattattgcattttaatttttctcccctcacctagactatccattttatttacaattaggacaatcaatgactttagtaataccagatattattcactttacttctcctattgtatagaatttcaacaatctacttttcctagtttcataatatttcttcttacattccataatatgttttaaaattatttgcttctaatttaacaaattttctactcacaaaaagaattgcataggtatggcattttaaatataagcaattaatattgaactgctcgagtcgtataaatacgaaactgagtatagaaaaatacgcagagattttcttaatagtaaatttttatagaaagacataaattgactacgcttctttcaaaatcgactaatatattttcatgaaactttcgatcatattaattattgaatgaaatgtttacaatttagtaaataagatactaaattattacataaactgataatgtgtaataattaaatattttttaaacatagattaaaaatttatattgaaattcttaactaaatttaatataattattttataataaaagaaaggagtttttatatgaaaagaaactttccaaaattaatagctttaagtttaatattttctttaagtattacccctattgcaaacggtgagagcaattcaaatatcaaagcaaaagataagaagcatgtgcaagttaatgtcgaggacaagagtgttcctactgacgtacgtaatttagcgcaaaaagactatctttcttatgttacttcgcttgataaaatctataataaagagaaagcctcgtatacgcttggtgaaccttttaaaatttacaaattcaacaaaaagagtgatggtaattattattttcctgttttgaacactgaaggtaatatcgattatatagttacaatttcaccaaaagtcactaaggattctagttcatcttctaaatacacaatcaatgtttcttcatttttatctaaagtcttaaatcaatataaagatcaacaaattactattttgacaaactctaaaggttactatgtggttactcaaaatcataaagctaaactagtactaaaaacaccacgtctagaagataaaaaggtaaaagagaccgagaatatacctactggcaataatgtaacgcaactaaagcaaaaagcttctgtcactatgccaactagtcaatttaaaagtaataattatacttacaatgaacaatatgtaaataaacttgagaattttaggataagagagactcaaggtaacaatggttggtgtgcaggctattctatgtctgcattactaaatgcgacttataatactaacaaatatcatgcagaagctgtgatgagatttttacacccaaacttacaaggacaacaattccaatttactggtttaacgccaagagagatgatttattttggacaaactcagggaagaagtccacaacttcttaatagaatgactacatataatgaagttgacaatcttactaaaaataataaaggaattgctgttttaggtagtagagtagaatcaagaaatggtatgcacgcagggcatgctatggcagttgttgggaacgctaaattagacaatggacaagaggttataattatatggaatccatgggataatggttttatgactcaagatgctaaaaacaatgttattccagtatccaatggcgaccattatcaatggtattcatctatttatggttattaaaatttgtattttagaaaggtaaataatattatggaacaatttgaattatttagtattaataaattcaaatgtaattcagaggctacgtattatcttaatattattgagggagaatggcatcctcaagatttaaatgatagccctttaaaatttattctcagtacctcagacgattctgattacatttgcaaatatataaatacagaacacaaacaactcacattatataataaaaataatagctcaattgttattgaaatatttataccaaatgataataaaatactactaacaattatgaatacagaagctttgggaacttctcctagaatgactttcattaagcataagtcataagactacctagatatgattaagtaaactattaatcttattaaaggactctaggaagaaaaaatttcatgcgatgagattgttttagaaaaagcgacgatatatataatttaacaatgattttaaaatattaagaacccccagcatatgctttatatagcttgctgggggtttctcatacaatatggatcgagcatcttgcatgtataaacaaataggctattcaaagtaaaattactcaaactttgaatagcctttcctcttcaaaaagtctttatttaaattggattatgttattgtattttcttacctacaaaaatgatttcttgatgtgatacttcaatcgtgccatctttttgttcctgaaacacgggtttttcaatacgttttaccggcatatatccttgcgttttcattcgtgacaaacaatcagcaattgtttcgttctcatttactttgaatttcatgttctactacactttccagttcttctggttcataatctttaagctttctacgacgaatgcctttagtccagaatccaccatgtatgtttcgaggttcatacgcaatgataaatgctttcggatctaaattttttatcgtatccatcaatttacgttcatattttcttggtgttaaaatttgcatcaccatacgactaccatctctaccaaacgcagcatagtgcgtaacgccatatcctaaatttcgaagttcattcggtaaatctaactcatattctgctgaagttacatttacaactgtataacctaatgccagtttttcttctattttcataccaacaatgatacctattgaaaaaccaaatgcgtaggcaataatattttgaatatggtctaaattagacataaccaaacctaaaccaacgatataaactaatacttctaaaaaactaactgatgctgcaatataacgataacctttcaacgttaaaattgttcgcattgttaaaaacgttacataacaaacgttaatgataaatatagttaataccattaaccatggattttctgttacgaatgacataaggcgccccactctctttcaattacactttaaatatcaaactgcttcaaactaaccttaatgaatgcatattaatataatatagtacgaaaactctcataaataaatagcgaatttgtcataaataaaaatttattctcaaatgaacatactcactttatttcatacactatcaatttatatactgaagtagcctagttgaatgtggtttaacgttattaattctaactcgtatttaatttaagtcacacgttagaagaaaaaattaaattaggattttggccacgtgtatcttgtatatgcaagttcacgtttatgtgcattccgtatataatgattttcaattactttttgttcttctggcgtaactggcttaccttctaaataattatcaatcgcttcatatgttacacctaatgcatcttcatctggaagttgtggtttgtcatcttctaaatcagcagtaggtgttttttcatacaattgttttggtgcaccaagataagctaataactgacgaccttggcgcttattcaaaccgaatataggtgcaatatctgcagcaccatcaccatatttcgtataaaaacccgtaatattttctgcagaatgatcagtgccaactacgataccttgtcggtttgaagcaattgaaaattgtactttcatacgttcgcgagccttttcattacctttttggaagtctgttaggacaatcccagcttctttcaatgattgcacactttgatcaactgcaggcttaatattgactgttactatttcatctggctcaatgaatagtaaagcttgctcaacttcatcagcatctttttgaacaccatatggcaacttaactgcgataaatgtacagtcattaccctcttcacgtaattcatttactgccatttgaacaagtttccctactaatgtagaatcttgaccacctgaaatgcctaatactaatgatttaataaatgaatgtgattggacataactttttataaactgttttaactcagcaatttcttccgcactgtcgatgcttttcttcactttcatttcttgtacaattacatcttgtaatttagtcattatcttcttccatctccttaacatgttccgccacttcgaaaatacgtttatgtttattatcccaacatgctttacttaaatcgactgggtactcttgtggatttaagaaacgcttgttttcatcccaaatggattgtaatccttgtgctaaataatcacgtgattcatcttctgttggaatttgatacactaatttaccattttcataaatattatgatgcaaatcaatggcttcgaaagattttataaatttcattttataagtatgcactggatggaataattttaaaggtttttcatcgtatggattttcactttccaaagtaatataatcgccttctgccttacctgttttcttgtttataatgcgatatacatttttcttacctggcgtcgtaaccttttcagcgttatttgataatttaatacgatcactatatgaaccatcttcattttcaatagctacaagtttatatactgcacctaatgctggttgatcgtatcctgtaatcagctttgtaccaacgccccaagaatctacttttgcaccttgtgctttcaaactcgtaatcgtttcttcatccaaatcattagacgcgataattttagtttcagtaaatcctgcttcatcaagcatacgtcttgccgctttagataaataagcgatatctccagaatccaatcgaatacctacaaagttaattttgtcacctaattcttttgcaactttaattgcatttggcacgccagattttaaagtatggaatgtatctactaggaacacacaatttttatgtctttcagcatattttttgaaggcaacatattcgtctccataagtttgaacaaatgcgtgtgcatgtgtaccagacacaggtataccaaataatttacccgccctaacattacttgtagaatcaaagcccccgatgtaagcagctctagcgccccacaatgctgcatcaatttcttgcgcacgacgtgtaccaaactccattaatttatcatttgatgcaatttgacgaattctactagcctttgttgtaattagtgtatggaaatttacaatgtttaataaaattgtttctattaattgcgcttgaatcaatggtgcttctacgcgtaacaatggttcattaccaaagcataattcgccttcttgcatcgaacggatgctgcctgtgaattttaaatcttttaaatatgataagaaatcatccttgtagccaatagactttaaatattccaaatctgattctgaaaatccaaaatgttctataaaatcaatgacgcgttttaaaccattaaaaacagcatagccactattaaatggcatttttctaaaatataaatcaaatacagccattttttcatgaatattatcattccaataactttcagccatatttatttgatataagtcattatgtaacattaaactgtcgtcttctaattggtacactcgtatctctccaatcgacctaaatattttcttacattttatcataattcatttttttatatacataagagcccattaatttccatacttttaattaaaatcaaccaacaatttaatgacatatacataatttttaagagtattttaataatgtagactataatataaagcgaggtgttgttaatgttatttagagaggctcaagctttcatagaaaacatgtataaagagtgtcattatgaaacgcaaattatcaataaacgtttacatgacattgaactagcaataaaagaaactgggacatatacacatacagaagaagaacttatttatggtgctaaaatggcttggcgtaattcaaatcgttgcattggtcgtttattttgggattcgttaaatgtcattgatgcaagaaatgttactgacgaagcatcgttcttatcatcaattacttatcatattacacaggctacaaatgaaggtaaattaaagccgtatattactatatatgttccaaaggatggacctaaaattttcaacaatcaattaattcgctatgctggctatgacaattgtggtgatcctgctgaaaaagaagttacacgcttagcaaatcacttaggttggaaaggaaaaggtactaattttgacgtgttaccactgatttaccaattacctaatgagtcagttaaattttacgaatatcctacttcattaattaaagaagtacctattgaacatgatcattatccaaaattaagaaaattgaacttaaaatggtatgcagtccctatcatttccaatatggacttaaaaatcggtggcattgtatatccaactgcaccctttaacggttggtatatggtaactgaaattggcgtacgtaactttattgatgattaccgttacaatttactagaaaaagttgcagatgcgtttgaatttgatacacttaaaaataattcatttaataaagatcgagcacttgttgaattgaactatgctgtgtatcattcctttaaaaaagaaggcgtatcaattgtcgatcatttgaccgctgcaaagcaattcgaactattcgaacgtaatgaagcacaacaaggtcgtcaagttaccggaaaatggtcttggctagcaccgccattatctccaacattgacgtcaaattatcatcacggatatgacaatacagtaaaagatccaaactttttctataaaaagcaagaatcaaatgctaaccagtgccctttccatcattaagttagtagaggtgtagcatatgcaattatattatttaggccctaaaggtacattttcatatttggcttgtcgtcagtatttttctgaaaatgaagcaacttttcaaccaaagtcaaatttatttgaagtcatcaaggcagttgcagatgatgacacatcgattggtattgtccctattgaaaattctatagaaggaacaatcaacattgtggcagatgcacttgcacagcaagatgtctttgcacacggtgaaatacgtttagatattaactttgcattatatggtaatggttcgaacaccatttctgatattaaaaaagtgtattctattgcaccagcaatcagtcaaacaacaaattacatacatcaacatcaatttgactatgattatgtcgacagtacaattcaaagtttgactaaaattgaaaatggcgttgcagcaattgcacctttaggtagtggcgaagcttatggttttacacctattgatacacatatcgaagactatccacataacgtgacacgttttttagttataaaaaatcagcagcaatttgatcaaaatgcgacatccttgatgtttttaattacaccaatgcatgataaacctggattgttagcaagtgtgcttaacacatttgctttgtttaatattaatttatcctggattgagtctcgtcctttaaaaacacaattaggtatgtatcgatttttcgttcaggctgattctgcaattacaaccgatataaagaaagtcattgctattttagaaaccttagatttcaaagtagaaatgattggtgcttttaattaaactttattttctaggttctacaatttaaataaaataaagagtcaaccaaggattaaaataggaatccatccttggttgactttcttttgtttgtattgtttttacacgatgctgcggtatacctttcgttaccactcgttcaagcaattgctaatgtaactttttatttttcgttctaatctgcaattactatttcaatggcagtggttgatttatatcaatacctaaaactataggcattacataatacacgactaaaataataattattgcactaattaagtttacccagaatcctactgatgccatttgtttgatagatattttacctgaaccaaagataattgcattcggtggtgtccctactggtaacatgtatgcacagttagccgccatagctgcaggtgccataagtagtaatggatgcactccaacagcaacagacaacgttgctaaaatcggtaaaatcatcgttgcagttgcggtattagatgtcacttcagttaaaaataggacaaagatcgttatgacgattacaataagaatcggactaacaccatttaatgatttcaactgttcgcctaaccattttgctaaaccactttctgatatacctttcgctaatgctaaaccgccaccaaataaaattaatacaccccaagggagctcttttgcaacttcccagtcaatgatacgacgatgtttttcagtatttttagctggaataataaataataatattgatataaatatagcaatcgtaccatctgcaacggatgacgtaacttcccattttttcagaagaaattctcttgtaatccataataagctggccagtacaaagatagtttgtactaccttttcttcatacttcattttgccaagctcgtctaacttttgtttaattaacgtctgaccaccaggtaagtatttcaaatcatgtctaaatgcaacatatcttaaatagagccaagtaatacctaacaaaacaatgaccgttggaatccctacaatcatccatttagcaaaactaatttcatgtccaaaatgttgcatatattgtccttttaaaataattaatggcggggttccaatcaatgtgcccaagccaccaatcgtacctgcatagccaattgctaaaactagagatttttcaaacttttgaatacttgtttgattcgtattggcttcttgtaaatcatgtgcttccttaataattgctaaaccaatcggtatcatgatcattacagctgcagtgttcgatacaaacatagataagaatcctgttgccaccatgaatccaagtaatatttttgaagtgcttgcaccaattaaattaataattgtcaacgctactctcgtatgtaaattccatctttccattgcaattgccaaaataaatccacctaaaaacaaaaagataatatcattaccatattcggatgatacttgttctggtgtaagtatgtgacctaatggtaataacacaattggtaataagctcgttgctgcaataggaattgcttcagtaatccaccaagtcgcaatccataaagtgattgctaagacatagacgcctttccaaggtaagtcttgtgggtgaaagaacaataatgttaataggaaaagtaatggacctaatatgagtccaataagttgtcccgcactaaacggtttctttttctttgattttgaaaagaatgttaaataccttttcgatatcattgattgatgttgattgaaataagccataaatttccccctcatgatgattatgacaagctacttcaactcactatattagagtatagaaagttgtctatcttgtattatcattaccgtcaaaataccccttttatcagataattgggtttattatagcatatttataccgttttatgaatgcgctttcaaaaattatctactattcttaatcctaatgtcatgcgaaactttttacttttttatttcatctacattgattgtagtaacttgaatacccgcttcaacaggacttaaaaacactgtatcaatatcttccaaatgaattgattgagtcgaattattgaatgtattcccaacgattaatacatctttatgtttaacattattataattacgtacatgtatcgcatctttagacattgaccctttaaattcgttcccaatgatattcatatttattcctgcttgggaacctaagtcttttcctgtcatcacatctgcagcatttttaccatctctaactcctaaatatctaataccaccctcacagttaataaacttattattaataatgaaagcatctttatacttcaagggagttaatgcataaccttgtatatcttcaaatatattatttctaatatgaatattctcatagtaacgattatgtctacttgcatgtgagccaatagcacgattccaacttcccatttcgggcaattctgaaggtccaaaataacaatcttcgataatgacatttttcgttatcgtaccatctgtcgttccgaattttggaaaagcaccaggtacttgaatgtctaattgtattgcttcagaataaaaacgttcgccactatagtcaacgaatccttcaaatgaacagtttttaatatagagtccattaatcccacaagcatcaattgcatgaccactcactacattcttaatggttacacctattaattgaatatcttcagcatgtccaatgcacatagctgtattattataaggatacgatacgccattcatatcaaacttgccacctttaatatgaatataactgtgtccattataaccacgataaaaaccaaagcgatgcccattttttaataacggaccagaatgacatcgacgtaaaatagtttcattatccaacaaaagtgttgtattgccatatatcgttaatggtttgcaaatatcatacgtccctttcggtatataaactgtcgttggtttacatcttccatgatttaacgcacgttgtattgctcgagtatctttagttttgtttatgcctgttaacccataatctttcatattgatatacataaatcgtcatcctttgtctattttctaattactcatatattaaccaattattcaaattataatcgtgttaggttgatttagcagatagtcataaatctcgtgatgccatctattagcatttttatattcaaaacatcaacacttgatattagttctaagtttgtcacatttagtattctattacagctattttaaaactatcgtaaaaacatcttataatatttgttgattgcgtgatttgctcttccaaaaaagttgattaatctatatacttaatctatatttatatattaaccattagggttaaaaattactctagcatttatgaatagatgggagtttattttattattatataggagagatgttgaatgacacatcgcgcactattagttgttgactattcatatgactttatcgcagacgacggcttactaacatgcggtaaacctggacaaaatattgaagattttattgtttcgcgtatcaatgactttaattattatcaagaccatatattctttttaatggatttacattatttacatgacattcatcatcctgaaagtaaattattcccaccacacaatatcgtagatacaagtggtagagaattatacggtaaagtaggtaaattatacgaaacaattaaagcgcaacctaatgtacatttcattgataaaacgcgctatgattcgttctttggtaccccgcttgatagtttattgagagaaagaagtattaatcaagtcgaaatcgttggtgtatgtaccgatatttgcgtgttacatacagcaatttctgcatacaacttaggttataaaatttcagtacctgctgagggagtggcttcatttaatcaaaaagggcatgaatgggcacttgcacatttcaaaaactcattaggtgcagaggtagaacaacacgtttaaatcgtgctaaaataattataaagaatacaatatacaagggagatatttgacaatggctaaaacatatattttcggacataagaatccagacactgatgcaatttcatctgcgattattatggcagaatttgaacaacttagaggtaattcaggagccaaagcataccgtttaggtgatgtgagtgcagaaactcaattcgcgttagatacatttaatgtacctgctccggaattattaacggatgatttagatggtcaagatgttatcttagttgatcataacgaattccaacaaagttctgatacgattgcctctgctacaattaagcatgtaattgatcatcacagaattgcaaatttcgaaactgctggtcctttatgttatcgtgctgaaccagttggttgtacagctacaattttatacaaaatgtttagagaacgtggctttgaaattaaacctgaaattgctggtttaatgttatcagcaattatctcagatagcttacttttcaaatcaccaacatgtacacaacaagatgttaaagcagctgaagaattaaaagatattgctaaagttgatattcaaaagtacggcttagatatgttaaaagcaggtgcttcaacaactgataaatcagttgaattcttattaaacatggatgctaaatcatttactatgggtgactatgtgactcgtattgcacaagttaatgctgttgaccttgacgaagtgttaaatcgtaaagaagatttagaaaaagaaatgttagctgtaagtgcacaagaaaaatatgacttatttgtacttgttgttactgacatcattaatagtgattctaaaattttagttgtaggtgctgaaaaagataaagttggcgaagcattcaatgttcaattagaagatgacatggccttcttatctggtgttgtttctcgaaaaaaacaaatcgtacctcaaattactgaagcattaacaaaataatactatattattgtctaattatagacatgttatatttaactaacagttcattaaagtagaatttatttcactttcaatgaactgttttttatttacatttgactaatttacaaccttttcaatagcagttttcattcctttagctatcctaacccacagattagtgatttctatacaattccccttttgtctttacattttcttaaaatatttgcgatgttgagtataaatttttgttttcttcctacctttttcgttatgattaaagttataaatattattatgtacacgattcatcgctctattttcaactttcaacatatataattcgaaagaccatttaaaattaacggccacaacattcaaatcaattaatcactttttccaaaataatcatataaggaggttcttttcattatgaatatcattgagcaaaaattttatgacagtaaagcttttttcaatacacaacaaactaaagatattagttttagaaaagagcaattaaagaagttaagcaaagctattaaatcatacgagagcgatattttagaagcactatatactgatttaggaaaaaataaagtcgaagcttatgctactgaaattggcataactttgaaaagtatcaaaaatgctcgtaaagaacttaaaaactggactaaaacaaaaaatgtagacacacctttatatttatttccaacaaaaagctatatcaaaaaagaaccttatggaacagttttgatcattgcaccatttaactatccttttcaactagtgttcgaacctttaatcggtgctattgcagcaggtaatacagcaattattaaaccatctgagttgacaccaaatgttgcacgagtgattaaacgattaatcaatgaaacatttgatgcaaattacattgaagttattgagggaggaattgaagaaacgcaaacgttaattcacttaccttttgactatgtcttctttacaggaagtgaaaatgtaggcaaaatcgtttatcaagctgccagcgaaaatttagttcctgtgacattagaaatgggtggtaaatctccagtcatcgttgatgaaacagcgaatattaaagttgccagtgagcgcatttgttttgggaaattcactaatgccggccaaacatgtgttgcaccagattacattttagtacacgaatctgtaaaagatgatttaatcacagccctatcaaaaacgttgcgtgaattttatggtcaaaatatacaacaaagtccagattatggccgcattgtaaaccttaaacattatcatcgtctgacatcattacttaacagtgcacaaatgaatattgtatttggtggtcatagtgatgaggatgaacgttatatagaaccaatattgttagatcacgttacaagtgattcagcaattatgcaagaagaaatttttggtcctatcttaccgattttaacgtatcagtcattggatgaagcaatagcctttattcaccaaagaccaaaacctttgagtttatatttatttagcgaagatgaaaatgctacacaacgtgtaataaacgagttatcatttggcggcggtgctattaatgatacattgatgcacctagcgaatcctaaattaccatttggtggtgttggcgcctcaggtatgggacgctatcatggtaaatattcattcgacacttttacacatgaaaaaagctacattttcaaatctacacgattagaatcaggtgtccatttaccaccatataaaggtaaatttaaatacatcaaagctttctttaaaaattaatttttgagacaaaaataaaccatgcttccataatttgatgttcttgaaaacaatatatttcaaggtatacacaaattttttggaaacatggttttctttttatcatgattaattaaagattaaaatatgacacatacaccttcagatgctacatgagtgttatcacatagcgtaattttacctgtttctttatttctttcgaaaacagttacaactgaatctccttgctcatgagcacaaactaaaaggtcatctgatgagacaatattaaaatctcttgggaattgaccaccactttcagtaattgttactagttctaagtgttgaccattatcaagaactttaaaaattgcaatgctatcatgccctctattagatacatataagaattgttgatcatgagataaacgcactgctgcaagtttagtatctccatcaaagttttcaggaattgttaaatgacgctcgagctcttcaaatttaccgtcattatattctgcaacactcacagtatttgataattcgtgtacgacataagcaaattttccattatcatgaaattcaatatgtcttgtcccatcactatctttaaataaagattctttataaaattcaaacccgttgtcgtcaaatttataagtaatgatacgatcagcacctaaatctgttactgcaacgtacttaccatctggagtttgattaatataatgtgcatgtggatgatcttgtctttcatgtgtacctgttggaaaatcatgcgcaagttcttgaattagacgtataatttcacctgtgtgcgtatttaattcatacatacgtatgatgccagcaccatataccgcttcaaataaatatcgtttatcttctgaaatcgatacataacaacctgtaccagcttttgaagacaaacatttatttaataaatgcaattcaccattgtcatcaattttcaaactcgcaacaccacattgttcaccttctttattgattccatataaaaattcattattacgcaccaaatatgtagacgcttctaattcaaatcctgtttctaataaatcaatacgcgactgattttcgtttaattcaaaacgataaatccctttaccattctttttagtgtaagaaccaatatatccatttgtcattacttttacccctccatgttagtcttattttcattttattaaattttagttggaaataacaatcatttactttactttatctctaaaattctccgccaatgcaacctatttactcctattgctgtcctcacttttgattataaatgttgctctttttacttacttgaccaaataaattttagaaatcttatcaatgtttataagatttcttattgcaaaacagaacacacgttcgtataatataattatcagattgaggtgaatgaaggatgacaagttatgaagaagaaacggattatcggaacatcccaagcgaattattagatagcaatatcccagtaggaagaggaatgattaaatgggcgccttttgcaacattacccgaacaattcgaaacgattcaacaatacattatcgatcaaaacaaaattacacgtcctgtattatcagatgatcaattggctgagctaaacattcggctacacgaggcgctacaatatgcccaacctgtagaagttaaattttataataatggctttgtagattcagtacgcttaaccatttatcgtattgatgctattaattatgaaattgatggttatgtttacaatcagcaacaacgtcaaaaaatttctatctttgatatcttagatattgtcttgttaccttaatgctttgaacataattaaaggcaagaacaatctatattgtccttgcctaaatgttattagttatttttactttcgatatcagaaataatttctttagtttttctttcaatatcttcaaaatcttttttaaagatataagcaaatgctactacaccaacaccagcaactaatgttgtaatagcaactaagctaaatacgaatttaaacacacatttaataaaattccacatctcaatttcacctctgttaaattaaatacctatctacatttcattatactatcatacatagaataatcattaaataaatacccacttttacgaaatatattcatcaaattatatagcgagcaagctaatgattattttcaaaaatgccgaggaacctctgtttcaacgtgacatgaccttatatgctaatgttaacaacgactattatcgtgaatgctaacttaagattgatatttatgataagatgattttaagtttttaacttaatatccccaccatctataaaaatatgttttaactgattgataagtcttatacaccgagaaatcacctcaaacaattttatatttcatttagtaaaatataactttatttaacatgacattcaatatacatacgattactatttatttacaatatattacaactaaaaagaaaggagtcgatgatatgcaacaagtgacatcagatatcatgacttttagaggttcacatttcgagttaggtgttaaaactggtaaatggcttcaacaaacacctcttctaaaaaatcgagaaaaagaatggaaaaaacgtgtgccacgtttcgatatagatgtaaatgaaacttatcaaatattccaaacttacgcacctcaaatatgggaagaattaatgggactacaaagtgtactcaaaatgccaacacgccaaattattttaaactttggacattatcgttttaccgatttaaaagaaagtggttgcacggtctttcaaggcaaagacttcatggttagaaattatgattaccaccctgcaacttatgatggtcgctacttactatatcaacctacagatagcggtttagctcaaattggtcctgtatcaagggtaactggaagaatggatggtatgaatgagttaggattaactatgggctataactttatgcaccggaagaaaccagcaaatggttttgtatgttatatgattggtcgtctaattcttgaaaattgccgaaatgtaacagaagcaatccaattattgaaagaaataccacacagaagctcatttagctacatactgatggacaaatcattgaaccatgcaattgttgaagtgacgccgagatcaatagatgttcgttatgataatatatgtacaaatcattttgaaatattaacacatgaaaatcgcaattatacaaaagaatctaaagaaagactagcgcgtaccatttcacaaactaatgataatttaaatatgactacagcatttaagttattcaataatcctcagtatgaaatttacagtaaactattcaaaagctggtctggcaccatccatacatcaatgtatcaccctgaaacattaactgcatattttacattgggagaaaatgcgccaccagaaataatagatttcaaatcatggttagatggtcaagaccttaatatcactcactttactggcaatatagataccgacttaacttttgccaacaaataaataacaccgatattagagaaattatgcttcctaatatcggtgcttacatcctttatttattcaactttgatattaccatcaatcgtataaaattctaaaacattgtcgcttttcccaactttaccattagtaaatgttttatttttaactacgctatcacccgttcccggatttagctttagtatagtatcttcaggtttactatcatacttaaaacgaatatctccttgtttagtagaagcttttgcatctacttttgatggcatgtttttaaattcaatgtcaccatgatcgtttaaaaatatggattgtttaatttgactcttgtcgatttgtagcataccaataacaactttaatattactatttttaatgttacttttactaatataagtaggactattatttgtctttgaatctagtgcgtcaagatttgagtttttaataactacttcaccgttaatgctttgaatacttgtgttctctaaatcagcatcactgattctaacacttcctgctccagacgatatatttaaacgtttaatcattttatcaggcatttcaatcgttaacgttttcttattctcatgaaaaggattcatatcaattgcatatcctcttgtcttagaccttttatcactaatcttcaacgtcttatctactatattaattaatatatcattgtcaccatcatatttaactctaaattgattcccccgctttatacgaagttctgtactatccaaatttatagatacattgtcaaaagcatcgtctttgaatgttttatcatattgtttagtaccatatttgtttttatcatagctgaaccaaataatggttgctgctgtaaaaaagacaacaaacactaaaagcccaataaaaaagaatttcttcattttctaacgcttcctttgacagttttaatataccaaagtaaatattttaagattaaacgataaatgtattctaaaatcttaaatatgacaatgataaatactaatcctaatcctgaatatgatatggcaaaaaatacattactaattgagtctacaattcctctggatattgctgatgctaataaaataattggacaaaacagcagcaaaagtgatattaaaaataatgctaatacaaataatccaactatagatactggtataaggatgacaaaaatagatagaatgcctaaacttaatgaagcagcaacagctcttgaaatattttcaaatgttggtttagattcagcataatcaataacacttctagcttttgtttcagctgcaacatcttgtgggtcttttaacttctttaaaatttcctcttcatcaacgccattaagttcttgctcataaaaaaaacgttcatattcatacattttttgatctcttaaatgtctaggtagcgcatcaagtgctgtttctaattcatttaaataagtaatcttgttcatataggtcactcatcccaataaaattattcattcgttttttataactttaagacctaaagctatttactaaaaaattcaatacgtttaatttctaaatcttgataaagtaagtttaattttaaatggttatctctatcaatatactttacagatgagaaatcattgccaacttttgttcttttatatccgaatccaagattttcaatcgcgttatttatcggcgaaccaattcccccatcaaaattagtatgtatcttttcatctcttactaatattatccccttaacgatgttatccttttctctcactttaacggtaaggtcagggtgagctttactgttataaaatttaaatcgatcaaacttaatttttttattgacttcatagccttttttatcaaacttatcatttaatttaatatcgtttatttcaagattagacaaatccacagtcttcgtatgacgatattgatacaaaccaattaatacaccaaaagaacagattaaaaataatataaacacaacccagcgattttgaatacgcactgatgtcaccctttctttgtacttatttaaatatagcataaggtgcttcccgtttcatccttaacaaaaattaacaaagaatttgcaattaatttatttcattaccttttattactataaattggtataatgttgtaaatgctaaaggaggtttttacaatgacaaatttagaaacttatttcaaaaatagccaacccttaaatgaatacattgatggaatgaagacaaatcaagataccgttctcagtatctatcaatcatttgagttaccagaagatgattcacgcatcaaaaaaataaaagagatgaattattctaaagtattagtaattactgaagactggtgtggagatgcaatgatgaatctcccaattctaaaacacatcagtgaagcattaaatttagaagtacgcgtgttccatagagatgatgatacaaaactgatcgatcaatatttaacaaatggtaaatcacgtgcaattcctatcttcgtattcttgaatgatcaattcgaacaagaaacagtttggggaccaagagcaaatgaagtccaaaaatttgtaactgatgttcgtgctgataaattaccgagcaaagatcatccagactatgcagatttagaaaaagaaacacacttagttatatcaaaccgctataaaactgacgcttcattttggaaagcagtttataattccatcctaaataaattagaaaataaataaatttacaataagacaaactttgaggttgggaaaatttaaaattcccaacctcaaaattatttttattaaatgtcttttttagcgacgtataagatattcaaaatgaagaatatcactatagaacctaatgaaattacccattgccaattgctaaaatcaaagttagagctaatcattttatcagttaagtaagcaaaagggatataatcaaaagcatctaaaactttatcaccatatcttggaataaatgtaatgaaaggtttaataaacggtacaataagtactaaaaatacacctaacgaaaatatcattgctgttttttgtgatgcaagtgtgattaagaataaaaacaagccaaagaatagtaaaaagattaggaagaaccataaattatctacatatttagaaaacgccaaatttttcccgttactagatgcctgcacaacaatcaaaatcacataatgaattaatgcaaataatattgaaattaaaataattgaaattgttttcgaaataatgtaaccaacgcgtgttttaactttactcatatatagttgaattgtaccttgtgaaaaatcacgcgtaattgtcttaacaacaaacattaatccaattattaacaataaccattttgctgcagcaaagacagatccatagacaataatatgtttcgggttatccatcgaatttgccataagtatactttgagttgcaatcaaactagatacgattagtatcgctaaatatgttaacagacttttaaaaatactataaaaatcatacttaactaaatttaaaattctcattatttatcacctctttgatttatattgaagtacgtatcacgcaatgaacttttacgtgtttcaatatatttcggataaatatctaattcagataatgcttttagtataacttgataatttttttgtgcattgatcattaaatgtccgtctgctttgtcgacattttgtaattggaaatgctctgcaagatatttttcagttctatcaaagtctttatgatcaacagtaactatcgttgtgtcagatgcaacaccttcctccatgtttacatcttgaacaaaatgtccgtctctcaaaaatacagctctatcacaaattaattcaatatcttctaacttatgacttgatattagaattctcatatcaagttcatttactagagacttaattgtagtcagcacatcaattgacccatctggatccataccatttgtaggctcatccaagattaaaaatttaggtttattcattaaagatactgcaattgctaacttttgcttcatccccattgaatatttcttaactttctttttaatataaggtctcataccaaatgcatctataattttgtctgtgtatgctttatcaaaacccttacctaatacttgtgcaaataatttcaagttatacaatcctgatttattatcatataatttaggatgctcaattaaaaaaccgatattatctgcattatcaatgtctacttttccatcaaatttaataatattaccattcattactttcataacagttgttttaccaacaccgttttttcctattaatccgacaattctactatcgccaaagtcaaaatcaatatcatttaaaacgacatttgagccgtatttttttgtaatatgttctaatttcatcgactgcctcctttaaattttctagtatttattttattgagctgtttaaaataattaacaataagtataacaatgctgataattagaaaaccaatatttaaaatatatgaatatagatctgggaatgatgattgacttagaacaaaataattcaccaacactattgcaattgaaaataaaaatggaactaaaatgataatagtaaacacgtatataccatatggcactttgactctacgcaattctgtaaattgactaaatgcaattggtatagacaagaagttagatatgacaaatgcatatgcagttgaaaaatagattgaatttggttcaatcacatctgcttcataagcatataaactaataacaagcgttccaattaatgttaaaacaatgcatgtaatatagttggcattaagcaattgtttttttgacactggtaaactcatataaaaataatatgaatcattaccacctaatctacgattgagtctaaataagtgaccagcatctaaaatccaaataatcaatattgttggacttataaaagattgcaataagtaaaagaactttgttgagtcaagcattatataaaaaggatataaggttaataatagaaaatagatgataagtgtatatcgtcgtaatttaaaattcctaattaacaatgccttcatttaaaaaccttcttccatcaatttgatgttttcataatatttaggttttctcttttcaagataaaccattaagttttcaatagaaggtgtagtgatattcactttatgacctaaaatttctttaaatacttgcgcatgttctgttaatcctataaatcccgtacgcttatgttcttcataaataagtagagatgctaattcatcatcaaggtcctcaatagcaccactcacaacttgatatctttgtaacagttgttcttttgaaccatttaagataacttcaccgtcacttaagtgaatgatataatcagctattttttctaaatctgagataatgtgtgtcgacatgaatattgttttattttcatcaattaattcttgctgaattatctccaatagctcatttctagctatgggatcaagacctgaagtaggctcatcaaaaatatacaattcagcatgatgtgaaaatgcaactgctagtgataatttcattttcatgccagtcgaaaatgtttttattgatttattgattggtaaatcgaacttttcaagataaaattcaaatacttgatggtcccatttacgataaaaaggggcaatcattttttcaagttgcttcgtagtccatctctcattaaaataattttcagagtaaacaaacccaattctattctttaactctatcggattgagagccatatcctcttctaatactctaataacaccagtttgtggttgatacaaatccataattaaccttattattgtggttttaccagcgccatttctaccaataaaaccagtgacgaatccttgaggaactttgaaagagatattctttaaattaaactgatcacttgaataattaacattacttaattctatggcattcatgatgattcctcctcataaatgaacgttaaaatatcttgaagttcctcaagtgacatttcgatggcttgcgcttcattaaccaattctttaaccaaattttcaatggtaaaaaattgtttctcttttaaaatagaactatcttgctccttaacaaaggtcccttttcctctaattgttgtaacaaaaccgtctttctctaaatcttcataagcacgtttcgtagtgatcaaacttacttgcaaatctttagcaagttctctcatagatggcaaatgttcgccaggagcaacatgaccctttaaaatattttgtttcacttgctgttttatttgctcataaatcggaaaatcactattgttttttaaaattattttcatcaacgtccccctatcaccttctgtatatatacaatatacacaatatacacagttttgtaaatatgcatgtctcattatcaaccagtcttcagaaataacactgagtattgtattactagcagttgaataaaatgaatagacactaccatttaatcttgcattgtctacttcaataaaaaagactgtcaaaacgaatattcttatactatagcggtgattgtcgcgtcattaagaacagtcgtttaaaacagtcaattctatttgttatttttacgtcgatcattacttctacttataaaagcacaaatcataaacataattgctgccaataatagttttataccttggctctcatggtttgttgcttgtaaataataaccaacaataaataaaataattgctaatgctacaaatatttttgttagatgtttcaatttatttcacctcaacatcgacattataacaaatataaagatttatcataacttaatatattatatagtgtaatataaccaatctctcattggcttaaatgacgacaaaactatgcattcaaaatgattattgattgcgatatattgtgttcaatgatattatttaagtgtatccacagaattatactacacaaccccaagtctggtaccagcagacttggggttatttatgtgtgtaggatcattttttatttttccatttcagttctaaccaaagccgaaaaataattagtaagccacctgtaataagtgtcatcatcccttcttgccaccacatcattacactacacctccgttcgactaaagtatcatactgaaggatgacctacacctattctaacataaaaacagaacatgtgttcgtattttggtggcggattttacatattattcgttaattcaccaacaacactttatctttggtataattgaagataatatataggcatacaatttttttaaagagaggttaagcaataatgaatcctttagcccaaaacttaaatgaacaacttcaacagtccaatgcaacagtacttaacatgttatctgacttaggtcaaaatatgttttatccaaaaggcattttatctcaatctgctgaagcaaagagtacaacatacaatgcaactataggtatggcgacaaacaaagacggaaaaatgtttgcatcatctttagatgcaatgtttaatgatttaactccagatgaaatattcccttatgcgccaccacaaggtatcgaagaattacgtgatttatggcaacaaaaaatgttgcgtgacaatccagacctatcaatcgacaacatgtcacgaccagttgttacaaatgcattaacacacggtttatctctagttggcgatttatttgtaaatcaaggtgacactatcttgttaccagagcataattggggtaattacaaacttgttttcaatacgagaaatggtgcaaaccttcaaacatatcctatctttgataaagacgggcattatactactgattcacttgtagaagctttacaatcatacaataaagataaagtcattatgattttaaattatcctaataatcctacaggttacacacctacgcataaagaagtgactaccatcgtcgatgcaattaaagcattagctgataaaggtacaaaagttatagctgttgtggatgatgcatactatggtttattctatgaagatgtgtatactcaatcattatttactgcactaactaatttaaattcaaatgcaattttacctgttcgtttagatggtgcaacaaaagaatttttcgcatggggattccgtgttggatttataacatttggaacgtctgatcaaacaactaaagaagttttagaagccaaagtaaaaggtcttatacgaagcaacatttctagtggaccgcttccaacacaaagcgctgttaagcatgtattaaaaaataataaacaattcgataaagaaatcgaacaaaatattcaaacattaaaagaacgctatgaagtcactaaggaagttgtctatgctgatcaatatcattcacattggcaagcatatgactttaactctggatactttatggcaataaaagttcatgatgttgaccctgaagaacttcgtaaacatttaattgaaaaatattcaattggtgttattgcactaaatgcaacagatattcgtattgcgtttagctgtgtagaaaaagaagatatcccacatgtatttgattcaattgctaaagcaattgatgacttaagataattaatatcaaccaataatctgatgagtatgacttggattattggttttttatttttaaaattattccttctttcaaagcatcaaaagatttattttattcagcaacttgtcaatcgctatacctaattagttttatacatctctcctaacataacttgatatgccttagataaatttatcaaacgtgcggcaaatcacttcaagtatcacatctctacaaatgaaaaaggcaccccactattgtgagatgccttaatataaaattaaagattaaaatttaatttcaatgtctacttttttaatgtcagttgctttaaatacttttgaatcttgtttcgcagcttttaagtcaacaaattttgatgacccgtctttaaaatacactttatacacagtgcgttcagaaagtccaatatcatgtttagtaataccttgatcgcttgctaacgctagtctaagtttagcattcaagtcgtttgttgttattttatgtggatgtaaaaacgcaaattcatttgaaactaaatttgaaaatccatttatcgttactggaaacttcactttagtcgctttgttagtcactttattaagcgctttattagatttagtgtgttgtttcacattaatatcaatctttttaatatctttgacactgaataaatttcttgtaaagatatctgatttaaggtcaacgacttgtgtctttccatttttaaagtgtatagtatactttgcttgtttcgcaaatttcaattcaatatcattgatacctctatcatgttttaaaactgatttaacttttttatttaaatcttgataaccaattaattgtttattcgaaagttttagttttgatgcaataggtgttgttgtcccatttactgcgattgtgtatggtacatagctatccgctttcgcttttgccccagttttaacatcgatatctatatttttaatatctttgacataaagcagattcagttgactaatattagagtttaaattaatcactttttttgttccatttttaaaatgtactgtataagttgcttttttggcatattttaattcacgttcaccgatacctctatcatgtttcaatactgatttaacttttttcgtgatatcactgtagcttacacgtgagtcacctgtaaattttaaatctgataaagttggatttgatgctccatttactgcaattgtatatggtacataacgctccgcttttactttcgaaactgtttttacagtaacttcaattctcttaacatctttcgcatgaactaagttagctgtataaatattcgagtttaaatgtatcactcttttaccaccatttttaaagtaaacagtgtaatacgctttctttgcgtgtttcaaatcacgttcactaacgcctctgtcagatttcaatactgattttacctttgttgttaaatttttgtaatttgtccaaggtttatttgaaaatgctaaattagattgaatattagttgttgtaccatttaaattaattgaatatggcacttgattatttacttttgcttctttatctttcgcttgctttttagtttctacatttatattgatatttttaatatcgcctgtattgattaagttcgctgtataaatgcctgctttcaaatcgataacttttttcgtgccatttttaaaattaactgtaaatttcgcttgttttgaaagtcttaaatctacatcagttatacctctgtttgattttaaaactgattttacattattctctaaatctttataactaatttgctgattctttttaaatgttaagtttgataaaatgttttggcttgtaccattcacagtgattgtatacggcacttgaacatttgcttttgcctctttatctttcacttgctttttagtatctacgttaacactaattgctttaatgtcacttgtattgattaagtcagctgtgtgaatgcctgctttcaaatcgacaactctttttgttccattcttaaaatgaaccgtgtattttgcttgcttagaaagtcttaaatcgatatcactaatacctctattaaagtataaaactgatttaactttattctctatatctttataactaatttgttgattcttattaaatgttaagcttgataaaatgttttggcttgtaccattcacagtgattgtatatggaatctgtattttagaatatccatggtgtaatgaacttgatgatttatctatttgcttagctgcggcagatgcttcgttagtattaaagtttgctcctgttgatgctataacgcctaatgctaatgttgttgtaatcaatgacttaaatttcataaattatctctccttttttatgtaattcgtgattgcaacttaattatagccagactttctctattttttgaattaactgaatattaataataaattatctttaacaataattttttaacactgttaaaagttcttttaattttgattaactgctctatttgctatgactaaaatgctgtttgattttgtttataccaagcttcaaacttaaatgtcattacaaccttcatttcttaattccgattacatttgtcgattatatttacagcatctttatactcaaaaaacatttacttaaaaatataaattcgatttaataattaatttaaatttagttaatcaattttgcatctattttgttgtaagctatataaaaggagtgataatgatggtgaaaaaaacaaaatccaacacactaaaaaaagctgcaacacttgcattagcaaatttattattaattggggcactgacagacaatagtgccaaagcagaaactaagaaagatgatactgatttaaaattagtcagtcataacgtttatatgttatcgaccgtattgtatccgaattggagacttttaacataaaattacttatcattcaaaaagtaaaacagcataatatcaaggtttataactttatcattatcaataatacctcatataaaataaaattttagggactttttagggactttaaatttaaaattacaagtttaatagaaacatcaaaataatcacatgtttgtgtggaatgtacaccccaaaagctagactgaaaaatctattttttgaggtgtatttttataggtaaatataataaattagagtagacaactcagaattccaattttataataatattgcttgacatatcaaactagatagtactattttgaatatattattataatcaaaaattcattgtaaacttttagacaaaaggaagtaataaaaacgtgaaatttaaaacaactaaagaatgtaaaagtaataatatctttaaaagaagtcaagaaattaataatagagaaagtgaaaagggttgtttatggggcattagcatgttgattctacttttcttattgattctgtttggaataactgcttgttcatcaagcattcactttattaattagatttttttacttggaggtatcatgtgaagaaccatacaaatataattaatatcttattagttatagtcaactcattaactcattttctaactctaaacacctcattttttaataattcagcatcggatttctgttttatcataggggctatatttttcttaatcgtaatttttgttgcaatatacggtatgaagcgagcaacatattggttaaacttattgattttatttaccaatattttttattttctacacttctgtgtgttacttttgttaaaatatataggatttaaattatttatttatgaagggtgtgtattgttatttatctaatttatagtctaattgtctatttcatctgcattataaattttttcataatggctgcaccattcttaatgactaatgctgattatgtatggacgcctatgactacagttacgttatttattttgagtttgattattttcttgatatttataaaaacaaaagatgtcgttcatttaacaattttcatattaaacttacttttttcaatactttattgtttgcctatactgttttatttatgaacacttttatattatctagaaaattaaaaccacccgtaaaagggtggtttttttaatatttactttttagtgcttcgtcaatttcgttataaatcttttgaagttgatattttgcttctgacattttcttaaagtcttttgacttaagagcatacattgctttttgacctgaaatttttatagttcgcttataataagtgtttaaacttccagtagctaattcattaacatttagttcatctaataacgattttaattcattagctaacttttcgttttgatattcattcgatgttggcaagcttgtgctagcttgtgcctcatttttatctagattagttactagtggtgatgctaaaacgattgctaaagttcccgcaagtatagattttctaattttcattttttattctccttagtaattagtactaatttattttaatgactaactaaaaaaagtacattaattattcattaactatatagatcttcttattaaatgaaaattaataaattatcaaattgacataccttattgtatttatagaaaaacaaaaaaaggtaagcaccgaaatgcttacctacttcccataaacaatataacacatatacattgatttggaaagcgcaaaaataaatttaatatactagcccgaaggggagcaatacataaaaaatgaaaggcgctccttgaaaacgcccaaggtaatattaacataaaatggctactattgcattatctaattttatttaattaaaacaaatatatatagcacaaaaaaactagcccgaaggctagcttatgaatagatgaaaatttgaacacattgctgtgtctaagataaatatagcacatattaattactattaatagaaaaattatagcgttttttagattatttcaatttatcgagaccaaattcatcaaaacactaattgaattttaatttttagttaaaaataattaatcttttattaatttcaagttaattaatatatttcgtcgattagattaaactcattttaggaatttcgcaaaactaactataaatttaaatatagaatttaaggagaattaacatcattatgaaaaagaaattagcaacaacagttttagcattaagttttttaacggcaggaatcagtacacaccatcattcagcgaaagcttttacttttgaaccgtttcctacaaatgaagaaatagaatcaaataagaaaatgttagagaaagaaaaagcttataaagaatcatttaaaaatagtggtcttcctacaacgctaggaaaattagatgaacgtttgagaaattatttaaagaaaggcacaaaaaattctgctcaatttgaaaaaatggttattttaactgaaaataaaggttactatacagtatatctgaatacaccacttgctgaagatagaaaaaatgttgagttactaggtaaaatgtataaaacatacttctttaaaaaaggagagtctaaatcatcttatgtaattaatggtcctggaaaaactaatgaatatgcatactaatagtagttacataaattaaaaggtagatatttcttttttatataaaggtttggcagacatttcataacttgccaaacctttatatatctaattgtcaaactgcactaaacttaccaaaactgcttattctattacctgccttgtctacctctcctgtcgctatataacgacgttgtccactattagcaatataagtaatccatctatagccattaatgcaatatgcgccgtcatatttgatagttgcgttattgggtaatacacctgtaattcttgaattagttgaatagccatccctcacgttattacctttaacattggcaactgtgtaataaccagtctcttttttatacggtacattgtttttatcgagtgtataacctgctggcactggtgaattcttttcatttttagctggtgttttaacattactgatacctgatacacacttccaataaaaataaccacaccatttaagatgcggtgtagcgactgtaatatttctatgttgttgagatatatgtatcgagtgaagggcaaaaaggatatcaattgcaggataagtgttaggttactaggccacttaacaggctatatagttcactcctactatatacagttaattataacataaaaagtaccccgtaaactattatacgggaatgctaaagtcatatatactacgagggagtagtatgaaaactatgctctctatcataagaaaaaacacccagtgacatgcttgggtgaacaaggatagatgtaaatagttgatgcatgtgtaacacatcataacaaaaaactagcccgaaagctagctataacatacaatctaaaaagacgtcccttgaatacgtctagaaagattataacataaaaaaataggcaagtaccgaagtacctgcctaaaaaaggattatccactttttcatcctaactgatttctccccataagtcacctaatatctgattaggtggggaagaaccattcgtgcatgaatgagaatttgatgaaagataattttcactacacatattcaatcaagacattgctttctataataaacaactattttgttttatttcttttctataataacctttgtaattaagttgaatccagggtttttaatatgctctgataaatctgggacaacaaaacctttttctgttatagggaaagacttcgtttcttcttttttcttattcttatcataataagtgacttcgatctttgcgcttggatctaattcaactactctaaactctttatatgctgtcgcatctaatgcccattcgacatagtattcaattttttcttttgtaagtgtagtcccaggtttaataggaaactcgacataatgaggggatagcaattcatttcctttaccatcaactccagtcacatttaccatcaaatacgggcctgttggttcaaaataactcgcgtcatcgccttttttatattttcctttgtcgaatgaacttgatgcacttacctcattagtaattgaagaaaatgagaataataacaataaaacagttaaaaataataaacctcttttgagcatggcgcttcctccaaatataatatatttgtttttatttatctctttttatagctaacacccttatttaagatgataaatatcaacaacttcattttatattgagaaaatattaaaaatcaataaaatattaaaagaaactaaaattacattaaaaaataattaacaaatatttaacattttaacctaagaattaaaacacttctttcacaatcaatctctcatgccatatccactcattatgattgttccaataaatgcgacaccaaccatctataatttcaaacacatatattaatgttccaggcgcgtatacagcctgtccaacatcgaatctatagttagtacgattatcaccgtatctagtggctgaagtagcacctaagccgtcgattttcgcattaaaataagcaccttttgaccatttaaggttataaggcgctttacttccaactgttattttacttgcagatttaccgactgctttttgagcaggtggtttaactttatttgtgatcttattcattaagccctcacttttatacttaggtctaataaagtgagtacagccgtaataattatcccaacgtaactttgcaggcgtatttgcgttaccgtcatagttctgttccaaaattaaaaattggtttgtattaccaccattaaacactaaaccaatatgaccgtattgtttatatattcctttggtaaatacagccacatcacctatttgtggaacaaacgatggtgtgttttcatatactgttgccatgtttttaaaatcgttattgattgcatcttttgcatttccccacattctaatttctaacaaccaataaatgtaatcaactgctaaatctgcacattggtaaccataccaaccgtcaaaatcaatatatctaccttgataccaacgtaaccttgctcttgcttcactgtatgttttcattattttacctcctagtattttcttcttggttcttcatattctaaagcttggtggctatcacctatacctttagtagtcgggtcttgaatcacaccagttaatactaaaaatcctaatatagcgtttaaaccgtctgttaattgctctatataaacttggatatcatacccaatagcttttgcgatgttttgagcaaataaaaagatagctgacaatatcgctacccaaaatgatttttgtttcattctaattttccaattaatcatattcttatctccttttacccaaaataaaaagacgactaataagccgtctatttgatatttatattatggtgtgttaatttatatatagaaaaagggcaacatgcgcaaacatgttaccctaatgagcccgttaaaaagacggtggctattttagattaaagattaaattaataaccatttaaccatcgaaaccagccaaagttagcgatggttattttttattgcttaattcaataagcttgattactagacctatcaatgcaataaggaataaaccaaactgcaacatggtactaattgtaatcattaggcgtctcctttctaaagatttcagtaatgccaccataggcaccacctccttatactcagatagccaccatctatccaacttgctcacttctgcatattaccataattacaacaataaataaaaagtcagtaccgaagcactgactaaaacttatttacatttaccgaaccaaaaacatgtccagaaactataaccaaagattagtttaaacattttattcacctctcttatatgcccataagcatacgcaataatgctataattagcgacccaaatattgtcccaactaaaccaagcacccacattttcatatcacgtatgttcttatcattttctttcttattcttttcatctatttctctttctttttgaatagcatctaaggttttatctaatttaatgttaacttactcttgggttttttgacctaatttaatttcgttgagtgtgctgagcattgttttatcattctcttctaaccttctgatgcgccattcatgttcgtgttttttgaaccaccccaattcagtacacccgctttctaaaagaataaagattatgagtatctaactcatagcttttcatactgtttcagtgttaactgttacctctggagataaatctgatctttcaactacttctttaactactttcacacgttgttttttgttagttaattgatataacaaatttaacgtctccgcaattttcttagcgttttcttcagatttaaaatcttgagcatggttaaccatttcagaagttgtaaaacttcctgtgaaatcttgatatactacacgttctgtaccttctttgtcgatttgtactaaaataaacctttctgtattgttgataatttcttttgccataattaaatgacctccttaaatttttgtataaaaatagtgctaaagattactcttcctcagcacattgttgattttctttattttcttgtatatacgcttttaacatcgcgttttcttgtgttaacctcataatttcctgtgataaataatgaattgtatattcaggattagcttgtaatccttgtttgttatcctgcattctttgactcctccaatttcttgattcttagttgttgttctttgataacagggataagatgaatccatagacgatcatacgctataccttcaatttctcctttgtcatcatacgtgacaaactcttttaatcctaaattctccacctcttcagcaatcaaacctacgtatctatcaagtttataggtgtcttccgataattttctatcttctctcagctctctagctaaaatttcagactcagctttatcaaaccacgttctaataggtaagttaagaatagcttttgaatgttccagttgttcatctctatcgttatattgattttcgatagataacttgtatttacgcgctgatgtcgaacgcccaattgtgccagcagaagtaatatgcaaattagctgcggccgaataagtacgtctataaattgagttagaagctatcctatctcctgcatcatctgaacctacagacagtaggtctgtactctgtatatgaatatacctattaccatcacgtcgtttcagcatattaaatttgccataccctgcttcgattgttgtatctccacctgttgcatatcgtccattaacaatttgaacaagacctttatttctttctttagaaaacctgatacccgcaccgtaatcatagttctcatcagaaccaaacataatataaccgtcactcgaataagcattatctgcattagacagcgtgaatgcaaatcggtttaatccaggcactttgtctgtgtttggatataaatacaccggtgcctgtttgcttttgatattcgatgaagcgtaagactccagaacaacccgattattatctgacgttagtgcaacgacaccaccataggaattgattgttatgccattcataccgctatcactgtaagttttatcccaccattgaatagtaccggatgaacctccgtcttcgccttctccatcaatatatgttgaaataccaaaatgtgacatataaagtgaaccgcctgcggtattatttctaaaccttagatgtccatctttaagacgtgtgaatatatcatcggttgatcgtttgcctttccaagttcgttgcacaataccacctagttcaatagaatcattctgtatttgaacatatctgttattgttaccgcctttaattccaattctattaacattgatatcaagaccctctcttgataaattaaggctgttgacaatatcggttttatctactttatctcgcatattttggataagaaggtttatttctctattaccgttaatatcaattttatcagcatttaatctaataccacgtggccccacatttaaagcttgagccactccgttatcatcatatctgattgttgttccatctgtaacgttttggacaatctcgtttaatatatttgaaagtgtacgattggttgcattaaactcttctttagtagttcttaatttgatttccttaccattttgtataatttgagaaccatagcgagtcagtgttctcctctgtgcatctgtgctttctttgaccttgttgtctgtataagcattagctttcttttcagcgtttctagcctttagttctgcgttttgttttgcctcttcaagtttagcttgagcatcttgtatagcgcgttgctcttcttccgaaattttaccatcagcatacgcttgcgattccttctctttaagattatcttgagcatcaatgtatgattttaaagcttcttgcgcttcttgatttgcttgttcaatacttgctttaatctcaggattattggacaaatcacttaactggtcatcagtatattgtttttgttcttccaatccgtttcgatattcgtttaacgtaactttatctttgatttcaccttttaaagtcgttctctcagcttcagcagtatctaaacgttcaacaataccgtctttgtctgttttatagtccgatgtttttacatagtcacgtaattgttcttttgtggattctctagctgcttcaatagctgatttaacaacattaggttctccgactaactgcaaatcttcattcaccgttaaaccaaattttgttgctattatttccaacgcttctttatatttttcatcagtgtattgtgactgtaataatttaaatctatctgaaatggcgattttgacatcttctacatctgtataaacatcttgtaatttctttctatactcaagaaataaagtttttgtatctaccaaccgaccaatcgttgcagtttcgggtgtcatagattctaaattatttttaatttgattataaacatcaatcacagcgtctaaacttgcttgtaagtccgctttcaaatcattatctactaagtactcgctattcagtaattctgtagcttctgacaaaagactagcgtgttgtatagataaattaataaaaatattgtttaattcactgaatagcgctttctctcttgttataccacctaatttttcaacatcatttggtgttgcttcaatccatcgaccattccaatatctacgcaagacagcaacatcagggttacttgtatcataccaaagcgtatcattgactggattttctggcggtgtatcacttttatgaattttgcgttcaaagtattctaattcaccatctacaacatcttttactatagtattgatattgctaatattgtcgtttaatttttggtgtattaggtttaatcgcttgttaaactcttctcgtaattctgattctttgaactctttaggttgaccgaatgtatatgtgctattttctgaaattatgttatattcttcagcaataacttctgcctctacatacaatggcgggttaaaatctctatgttttactctgactgtatcgccaattgatataatctcgtgcggatacgtaacttccaaatcagtagaagtaatctcatatgacataactgccgacttacgtttatttaactctgttttggctaaagaacttaatcgtgtttcattcatattttgatcatctgattgtggttcatatatcccccaaatatagcgcataggtaggttgaattgactttgcgcttcgtcatctgtcacaactagctctaaacgcttccctttgtcattttcaggtcccacagcaattaatgctgttttgatttctgacatatcaatcttcctagttaacccgactaaatctttaccatattcaatttctttacctttgaataagctgtttttctttttgagtactacatatctacctttgacggtattagagctaagctcaatataaaaatctaaaaccattttataggttgtacataattgctttaaaacttcatatctagtttgataagaagtccatgacgtagtacgtaagccatcgtattcggtttgttcagaaacttcccaacctgtatcgctcaacacatctttcaatgcttctgaagttgtctttttctcaaattttcctggtgcatacggtttagctgttgttatatcagcaagataagacgctatacattctatctctgtgtagccgtccatcgtatcttgaacccagttaataataaattcacgccattgtttgtttgaatcccttataataacacgatgtcgttcacggaacttttcagctctttctgatgatatgagcagttcaagcatttctgaattgtcattaacattacgtttatgaatcgctctaactaaggaagggtcatcagtagaaaggaaatctataatcttgtcgttaaaatctaaaacatgtatcacactctcatctcctttctataaatatctatcttgccatttaaccgtcgtatcaaagacgttttcaggttgtatgattaattcactgtacccagaatcaacattgaaataattacttccaaacgatttctcgctcaacattggttcctcattgatgacaacactttttgcttgcatatctattttcactaaatcacctttttgtataatgacatcccttgcgcctttcggtttcggtagaatctccgtattgaatgaacctaatccattcatctccatccacttataaccgttatacttcgcactatagatagctatgatagaagctggacgctgataaaacttaccgccatctatccactctttctcatccatatcaataggtttacgtctatctgggtctttaatgtgatcaaatttccaagttttaatagaaaatttattacctactcttctgagccgcatataaacaacgattctgtccaagttatacattatcggtttattctgatagtcgtatatctttttggggtctcctttttggttatacaacgtaacaacaatatgtcctatttttctatcatgatatttattttcataaccaatagaagcaagtaacttaccatcactatcataaatatgttgtgctgttcttccggcacctttacctttttgttcaacaatacatttataggtaatttgaaaatctgtcatcgctttagggagccctcgtttcgtgccagcaccaacccaaccttttgcatcaggaaaattagttgctttatatccttcgccaagattggatatcacaaagtcaccgccgaccttaccacctaagtcattacttggaatatcttcagtaatcatcttagtccaacctttgaaatcacgaaactcactatgataaacaggaggcatgtaatccttaacttctttggttacctcatcatcaccaaccataaaataatcttcatcatttttagtaatcataaagtaactagatggtttaattgctcgggcttcaacaattaaaggagtgtcagcagtcccactatttacaactgaaacttggtctgaaatcgcagtatttttatttcctgttactgaatatttgtaagggtctgttagtactactttgatagtgaacttaacaggtattgtaaattctttgtgcagctttattggtccttcgaaataagcgttccagtaccaatctttagatttgaattgtaatttaacttgttcctcgtagttaaaaaactttactaattcattcaagacgtcatcatgtgttttaatgccgttgtgagataaatagtcattacgtaccaccaaaggtatatcaaaactataagattcaagcctacgccctttatatatagaccccgaacgtccatctacattttctgtttttaaaacataattaaaagagggtatttcaaaccctctttcgacatacaaccaaggaattgttttgttgttcactttaatagtgtctatcattgaatagcaattcctccttttctaaactttacttttgttgattcttgcctttctcgcttttctatagacgcgttcacctttttatcaaaagcgtattcgtcaataatcggctgataatctttatctgcaatcacatcgttagattgtgctattttcagtaataaagctatttgttgttgctgttgttcaatcattttcaataataagctaggatcatcaaacccgtttaagtctgataattggctaggacgcttatttttactcgcttttttccctcttacttctgctgctgcataatgcaaaatcttcattgcatcatttctacgagctggatctgttggaataatccattctggatgaccgtcttcacctaagttataccaaccatcaaaaacttttccacctgtagcatatgcgtaatcaccagcacgtttaaaaccaccccaaccatatcgtctaacaatgtactgcattgctgagataccttgatgtactggattattataattagtgtaccctcgtttagcgttagctctaaaagttgagccgataatttggaataatcctctagacgggtctcctctttgagcattaatatcccaattattcactgcatttgattgatagttgctttcacgctttgcaactcgcatcatctggtcatgaatccacttacctttataacgtcctcctaaaatactttgcgcttgtcggattactcggctggcataagttgcaccacttccagaagtagcatcaccgccaccaattgataacctaccttttttctttgcatttcttaaatatggttcagggttaaaatggcgtccgtttctcctcatttcaaaatgtaagtgtggtcctgtactaaatccggtattaccagttaaaccaacaacatcgccgggctttaccatcgtgccactaggtggtgatttgctaaagtttttcaaatgcgcaaatagcatatcgataacgccactagtaatttttacatagttaccataaccaccagacataaacggcattcttgtaagtctaccacccataggcgttctaacttcttgatatacaaatggaaaatcgacaccttcatgaaatggtcttccagttgcagcggtataagctgcggtacgtccataatgataattaattttgtcagggtctaatattccgccgactaaatcgccaccgcccatagcttctaaattttcttttatccaatcagtagcacttttcttaatcttagaccatgcagcttttgttatgtcgcctgcaattcccattcctttagttaaagaattgaaatcaattccaaaagcttcaagtatataatttaaaagttttcctggattttcaataaaatctaaaacatcgccaactttatcgccaagccatttggtacctttacctatttgatcttttgtccagttaaatgctgatgatgcaccggacttaatatctttccacatagtacctaaactaaatcttggaagagttccgtttaacattgaataagtttgtgcaccgttatatacttttgagcctttaggtaaataagcagtagtatctgtatttggtgtgattacacgtttaccattagggaattcaatcatttcgtttctaaaaccatttggaccatttccgcgtcccttatctccaactgtagcgaatgtgtcacgtgcaatcttaccgttcttaactaatcttgtagtagtatgtgtgtgctctgtaccagtatgtaacttaggtattttatccatgcccaacttaccaccgacccagtttaaaccgtcgattaatttattaagtccttttttaatagcatctaccataccgccgatatgacttttaattttgctgataatactttgtaagccgtcacgcatatttgtaaaaattccacgtaccttactccataaacggctagcaattcctaccgtattatctttaatggaattccaaatatttgacatccaatttcttaaattactaaaaatttctttcgtcgcattccataaattagtaaattttgatttgacgccactaaataatgactgcgcttttcctatcgtattcgtacggatactactccaagtattagataaccaatttttcatattcgtgaaaattgatttgacactattaaataagaatccaaaaatactttttgtcgcattccaaattgctgataaagatttactgaatatactttttattacgtcccaaatacctgctattaatccttttagcaatccgccaaagtacctaacaacgccaagtattttgcctacaaaccataattgaattaaattccatattaattgaacgactcctttaagaatcataacaatcgcatcccaaactcctcgccaatctccagtaaataaacttgagaagaacttaattaaacctagtatgatatttaaagctccttgtatcacaccttttatattctcccaagtactgacaattaaagctttaaccgccggccaaataaattgcatcacttgccaaatcgcgaacatgattggtttaattacaaaatttataataaattcaaatatagctttgataaaattgcatatattttgaagcgcttgaacaatagaaattccgttttcattaaagaatccattaatttgactccaaatatctttagcaaaatcaactattgctgatatcgcttgtttaaagatgtttttaacagaatcaatgaaaggttgaataaattgaataaaattactaaatgtttgtttaacactttcaattgcaccattaacaaaatttctgaaagtttcagatttcttataagcaattgtaaatgcgactgctaagccagccaaaacacctaatacaatgccaattggaccagttaaagccgtgaagacagttcctaatataggtactttagtcgataaaaaactaattaatccatcagcctttgcaataccagctaatagtggggctaatacagttactgcattgccaattgtacttataaatgcgcctaatccaaaaactacaggaccaattgcagcagcaataccaccgaaaataacaattgatcttttagaaccatcacttaaattggaaaaccaatcaaccgctatagatagctttttgattaattcttccattactggtgcaaacgcactttcaatagaagtccatacatcagcacctactaattttaatttattcattgctactttaaatctttcggagccactttcagaatctttaaacgtttgatttactgtgccttgggaatcttcgatagtttttaaaaattcttgataactaaaacgaccacctttaatagcatctgctaaatcaggacctgcttttgcaccaaatgcttcaatcgctaaacttgttgcgctagctatatccggcgtcttttcaatttctgctaatgtcttcttaaattcttctcttggatttttaccagctttaccccaattggatatagcttttttcaaaccactgaaggctatttcagtattaacacctgatttctcccattgagagaataaagcgattgattctttcatctcaaagcccatagccctcattggagcaccgtatttagtaatgctatcagctaatgtatcaacacttataccgctagcctgtgctgctttcgctaccatatcaagtacactttgatactcatcagcttcaatacctgcatcacccattgcacgcgtaattaattgaacggcttgtacgccttcagaacctgttatgtgactaaatttcaagaatgactctgtggcactctcaagttctttgccagtgaaacctaaccttgtgttaacttcccctaaaacaccgcctacagtctcagcatctgctggaaagttgccataaacatctttaaatgaattctgcaacttcttaagctctccgccggttgctcctgttgcttgggtaactgtatctaaacctttatcaacttctgcaaaagcttttcctgatgctgctgcaatacctaaaacaggtgcggtaacaccaatcatcaaacctttaccaatggattttaaaccatcacccatttttgttaatttaggtcccatactttcaaaaactttactggtttttccccagccactttctgccattctttgagcttcaacttgagcttttttgaactcttcaaactcagttgttgttttttctagttctttttctaaaaaattcagctcatttgcttgtttgttatattcttgtcgtaatttttgagcttccgcgctgttttcgccctgttcttgagataccttgccatattgcttggctaaatcatcaacgtttttcttataacctgtgatagttccatcaagttctttaatcctttgtttgtaactatgagttgatttttcggtatatttgaagttgttaccggttaactttaagtcagaatttaaagttttaaagtttcgtttgatttctgcaaatgatctatttaaatttgctgcatctaaatccaaacctatagataaaccttttattctttctcccattttttacctcctttctaaaaaagttcaaaaaaataaccctaaccaaacggttaaggttaaaacgcatcaattaaagcctctgctttttcttcagaaatgtcattgtttttattttgatatatggaaagtacataatgaaatggcatttttaaaacttcgttagcgtctttaccattttcaattaagtccatcatgagagtatccatatttttcaacattgctttatatgttaaatcttcaggctttatttcatgttctggataaaatttctagtttcctcagtttgctgaccttgagtaatgaaaattacttgttcacgaagtgcattcattccatcaggtgcatgcatacgttcttttaggtctttaactgtgaattggttatcgtaaatttttacaaccatatccatcaatctgtcagcgatttctcttggtttcatcgtgctattttcgtcctcaatatcatcgattaaatccattgcttcgtatacaatttcaaatgaaatgaagtgtggtgttaagtacgtttgtaatttaatttcatttgctttcgggtcttctactaattgaataatgttacgttttaattttgccattttataatactctccttattttcaaataaaatagaggggttgccccctcttatgcttctacatttattgttatagtgtcactcatattaccaactgttgctttaaccgtagcaatgccttgtgcttccgcagtaacttgaccatcactattgattgatacaatattcgtttgatctgttgtgtatttcaataacttactttgattagatggctctactacaacatttaaatcgtatgtgtcgccaactttaagtgttttaatgctatctggtatattaaccgactttaccgcagtttccgatgaagccggtttcgttacaaagtttcttcgctatcctctgtcacgtttccagtatattcttcgcctaaaattttctttaagaaagcctcttcgcctttttcaccgtctccatcatgatttgtcatgttagctgaatcaaagatatacttacgtactgactttttattatcaactaaagggaaaagtgcctcaccttcaacctcttcacttgagaaatcccaatctttctcagccgtttctccatcgattttaggatttgtaaacataactttaggtaataaaactgttctaaatgtaccgtctctacgctcttgtctgaaccatacagctacgtaattgttttgtttaccttgtttctcttcgtaaacgccatcttcatcataatcttcattaaaaacaattttgcgaatctctttagggaacgcatgcatttgtaatgagattttaccttctccgtctgtattccctgattcaattggaccgccatcagcataagctgttttaagttctccaccagtttcaacaccaattttttgtaatccttttgtttttgtaatatcactatattttaattccgcgccttctttcgttaatttagcgaaacctaaaccagtaatgttaatatacgcctttggcgcacttgcatgttttactgccatttaattttcctccttataaaaaatgccctcgtaaacgcgagagcttctatatgttttaaattcttctatatattccggttttccatttgaaacatttcccatttttagttcagaccataataacttttgaatgcgattagatatcttatttcttatgattctcgcattatattcatcattgtacttaacaaaaacatctatttggacaatataactatatgcacactcatctccgtcagtataagttgtaggtattgggtcgtcgatatcgtcaataacaataaaaggtacatcagtatcttttacattagggtatttattgaacttaatattattgatatttacgtgctctctaataattctgtcttgactaatcacttcatgaactttgtacaaaatatcaatcacaattttttcaactccctttttagcgtctcaaaatacttattttgcccttgtcttattgctctattaacaccgcccatagctttaggtttgataaatttacctgttcctttttgaacgtgtccatattcaattaaatgtacgattttataacggtctttagaacctcgccaataaacagtaattgtacgttttccgtttatccattcaggtttactaaaacttacctcattaattaatgctcccgtatcttttgagggctttagttgtttttttacttcttcaacaattaccttagcaccagctattagcgccttatcttgaacttttaccatctcttttatgccaaaacgtttttctaattctctttctaatgctttatcacctatcactttcacactcatgaactatatcctccacgaatcataataaagtctttattatccaaatctggtgatacttgctttatattcaaacgatttttgaaatatcttgattcaatttcaagatattgttcttcactgggtaaataatcaccttgcggatcacgaatatacaatttaatgtcattttgggttccgtttgagatagcttgttctaattcacgtaaccagacaccatcaatactcgcccaacagctatataataatttttcttctttttctccagcttctggaccattattttcagtatacttataaaaatgaacacgagtatttaaacgtttagttgtaattctaggttttttaaacactttcttcatcttctgatacctccattagagataacgaaaaatctattatttcaggtctgtaattatcgttgaagtgttctaataaatcttgataagcatatctagcgcgtataagtatcaattcttgacctattaaattctctaattcaaaaactccgcactgattttttatacgctcgtacgacatttttaacaactgctttaagtactcatcctctgaattatggtcaatcttttcaagtgatttaaatttgacaagcaaatcatcaatcgtcattgtcttcaccattcaataagtcgacgatttcacttttaaccattgaactagacgcttttttttgtaatgattcgcatagttctaataattcttgttttgtcagcttatctaaaggtacgatataaactttgtcgtacttatttttgatttgatttgtcaacaattcaacacgaggattgttatacccttcagctggatacaactcccctactttgtacttgtgttgattgtgctctatgtctttaaaagctctaacaactttaaatttcaccattttatcacctcataaaattttatagtgtttcttcggtaccttctaaagctggcttatgtccttttaaatctaatttccaaacagcagcaactttattatctttcgctttgccgtaagcaaattgttttgcagtgtataaatccatatcatctaacgcaagtgtttctttaaatttctgaacattaataccaccagctaaataaccatcatataaacctttaacgtacgttaaaaccttacctgcttcttggactgtagactcgataacattcaaattaaatggtaaagcagtaacatatacgccatttgcatttaaatgtgtatactgtgcttgaacctcaaaagcatcggacggattaacaaccattgttacattacctttaaccgctactgatttacctttctcgttagttgagtggtatttaaacacttgcgtcaattcattaactgtagcgcgcggattagcaaatgtaagcgtaccttgttcttctttctctggataagcaccctcagttaccgatacacctttttgtacttgacggtttaagccgattggttggtctttaccagtaccttttaagaacgcagtttcaagcgccactgcaaatgcttcttcgatttgaacacgaacaaatctttcaatccacgcaggaccaaaatcatttaaatcttttggtaaaacaacaaacgctgtcaatttattttgaattgctgtttcttcactgaacgcagcatctaattgacctttaatttcaccatagattttaccccaaacggctacgccagaagtttcagattttaagaacttcaaacgcaaaccagcgtttttaatacctaaatcagctaataacggatgattcgtcgtcaaatcttcaaaaattctatcaattgtttcttctggcaaaagtttttcttctttatagttaacgtttttattgatatccatgaagaaacttctttggtttgcactcaaagattgtgctgatttaggtaaactagaaactctttcagcttctgcttttgcttgtaatttagtttcttcaaatagttggttaatcatgtcaccgtacaattcattttgtctttcttgcggttcaccgttgtttactgcattaataaattcgtttttcgcatttgcgaatgtttccgataaatttatagtcattttatgacctcctattttttgtattaaaaaaggaatcttgaaaatccatttgctgatactttactatctgcaacatcgatttctgattccttttctttcatatttattttttcaattactttatttgctattgcgtcaatatcaatgttaacctctggcgttttacttaccaaagctgttacacgatttaatacatctttcgataacacttgtgtattgcttgctacaatttgcatattgtcgttttcaaacattttactatccgcaaaaccttgttcaatggcttcatcagcatttagccacgtttccctagccatcatttctacaagttcttgtttgtttttaccagctctaaccgcatatgcctcagccattatttgaccaacatgttctaatgtttctgcagcatgatttagatctttcgcttctccttgcgcaatacttgaaggattgtgaatcatcattctagcaaccggactcatttcgatgtggtcaccagccattgcgataagcgatgccgcacttgctgctattgctgtgatacgaacattcactttgcctttatgagctcttaaatgtgtatatatttcactaccagctactaggttaccaccatttgagttaattataatatcaacatcttcatcactaaattctagttgtgttaaaacatctttaggacaagtcgaatccataccaagcatttcgtaaacccatttatcttcgttggaaacgatgacgcctttaatctccgctttcatcttcatcaccacctttcaaagtgttttcatctttttctttttcatcattttcaccactgttagctttttcgtagtttttagtaatcaggtattcgtctaattcaggattgtctgatggttcttcacctaacataatccgcacctcattccttgtaaatgaaccagaacttacaagtttgtcaattgcttcagcatattgaagtgggtcttttttattcacaccgacaatttctattcttgtatctttcaaatacatgctttgtgttatgagtttcgcgtttaattcgttctgaatcttttttaataaaggtgttaaacagaacttctcaaatacaagcgtgtttttttccaaatcagctgtttctccgtaaatcaaacctggaggtataccaatcatcaacgcaacattttttattgcatctctcattagctcactcaattcagaaaaaggcatgttactattcttaccaccattagataattcctcataatcaaaaccttctatcaaaggcgcgattgctagttgatttttattaaaagtattgaataatttatttgtgaacgcttgtaatttttctatattcttttcgtcatatgcgctagaggcaaatttcaaaatccctcttatttgatagttttttaattgtgcacctatcattcttccgaatattttcccgtaatcttcgaatagactttctacaaagtgtgtcactttattgttgttgtactttaaatatatgacctcttgcattgtgaaagtacgttgataagtggtatgtcaacaattttttagacagttttcatgtgtagatttttaaatgccactggcgtcaaatactgtaatgaagaatgtggtctaaaattgttgtaccaatttacataatcaaataattctgtttctaactgttctaagttttcaaattgcatttgttttacaaattcggttttcattgctttcatcgttgcttccgcaactgcgttatcataaggacaacctttggtacttaatgaacgtttgattttaaatgtttctaggacttcatctatcaaatgattatcaaattctttgcctctatcagtgtggaatagtttgatttgttcaagattatgatttattctgctgattgcttttgatactaaatttgcgtccttatttttacctgcactgtaaccaacaatttctctattaaatagatctataaataaacatatgtaatgccatgttcctgcgacttttacatatgtcaaatcacttactaatgtctccattggttgttctctattaaaagcgcgattcaaatgatttttaattcgttttttattagtttcttttggatgatttttgtatttagctttcgtataaacagaaactagattatgttttttcatgatacgacctatctttcgtcttgatacagtaagacccttatcatttaaattatttttaattcgtcttgtaccaaagacttttctattagaattaaaaatatttatgacagcacgttctacgtttgaatcatctttagtgattttattatcttttctttttatagaatcataataggtacttcttggtatttttaggactttacacattgctgatactgaatattgatgtgcattcttttgaatgacttctattttcgtcccatgatcagcgctgcttgctttaaaatatcgttctccatttttaaatgttgaacttctttacgtaatttaatcagctctttttcttcatctgataagttatcttggtgattgaatgtacccgtgttttgatgttgctttatccattttcctaacgccgaaggtgttaaatcatactcgcgtataatttcattcctaggcttaccattttcatataatctaaccatttgtaacttaaactctgaactaaatgatcttctttctcttgtcataataaaatcgcctactttcttaaattaacaatatctattctcatagaatttgtccaattaagtgtagacgattcataagtataatctttaaccgttacatctttgaatatatcatcatacaaagcgtactcttctctgtaaaagctatctgcgataagtaattctttgctgtcacttactacgattaaaacctcgttatcataaattagtttatatataacttgttgccaaaaactatcgcttgataagtcagtatttggttttatatttaacttgtagtaaacatcattcttttgaattctattaccttccaatactttaaaatgactttgagcgacagctcgcgcaacaaattcaatacaactatcaatcgctaaacgtttcacatacgcttgttgtgatagatcttctatcatatctaaatcaagcatatatgttatatctttcctagttttaaatatcttttctagaatactcatgtctcacctcctctattagaaatctatactcattaatgcatcaagcgctttagacatgtctttgtctactatatcgtctgctctatataatgcgtgaacaaaagccatgaacccatcggtttttcttctattttcatcttttttaatatattctttattaccatcgggtttaacctttactgcaacattattagtaaaccaacgcatcaaaggattgtctccatatattacgttatgtttcgcaaacattgtatcgatacgtggtgcaagtaatccatgtattgcttttggatttctaagtacttcaagttttatgccagcatcctcaaacgcacgtcttacaatatcagttctataattatcagctatgactttttcaagcccatatttttctctagcctttaaaaaccaatcaactatatattcaatttcaatgacatcatcattgacaatggtcaataatcccattttttcccattctttaataggaggttctaatttgacatcatccaaaaacccttgtcttacaaacgaatgtcctaaccaaatgtaatcatcgttttttcggaataatagccctacacttgcaaaatctcgaatgtttgcaaagtctaaaccaccaatacacatttgattatctaaatttggtatctctctattagtcgctagtatttctttccatggtgctattactttttcaaggtcaacttcaggcaaattcattcgcttagtcatgaattcgggcttatttgaacggttgaatggtaaatcgttatattcttcttcaatcgtacttagcagtgttttagcgtattctgataacggtttatgtaacattgggttcgccttttcccacgtctgtctgtcatcaacttcttttggatcgtctaacttacaataaaaagcaaacaatctactatttttaaccttgccacttaatacacttgcaattttgtgcttcattgcatcgatataaccctctctaacaaaaccatcagtacttatataaaacgttcttctatttttctttttacctaatccaccacgtttgacgtttaccatttcaggaccaaagaaataatgaatttcatcaaaaataacacacccctcacgtccaccgtctttggtttttgtgtttgatgtgttatatcgaataaccgatttagttgcacggtttattatttttgctttactaacttcataaggagcttttggcgttttacccgtcttatttcgtttgttatccattaaaacggttctgatttcatcaaacgatgtttttgcttgatcttcactattagcaacaatggagatgtgatattctttaactccgtgtaagggcgtagaaagaaaatcactaatagcacttattagaccgtttttcccgcctccacgtcccatgaaaatagcaaattctgtaaagaaagcttcatctgtatttttatctataagaaatatattagctatgataaacctttgaaatggtaatgttggaaaataccatttttcaataaatttgatacaatcctcgattttctgttcatcaaaatatacatcatctcgtgaatatatatgtttttgtagataattaaagagatcaattctttctttatttaaaattatctttccttgtttccacaaatttatatattcatcaacgtatttattactaatcataggtaatcatcagatggcgtttctgtgtcttctttctcttcgggcaataaatccgataattgtttgattattttttgatatgcagcatctctagcattaaatagtttggctactggtctttccctttcatatggtggcgccttttcagattgagtaaataaatcatagtcacctttttcttttatgtcttcccacatgtaatcaagcattacacgtagccttgctgcttgaataattaaaccatcaactacttttaatttattgctaggtatgtctttatataatacttgcagcctttctttttctttaagcactaagttttcatcaactataatctccatttcatcacctgccttaaaatggttataagagggggggttatacatggatttttaaaattatcgcgaagtcgagcccctgcccgttccccaagtattttgatcgcttttgatttttttgacccgggggtatttaccatttttcgtctttccatttattttctttttttataaatctcttttcttttttgttgtgacatttaatacatagtgtttctaaattgtttaagtcatgagcaaactccggatgatgttctagcgataatatatgatctacatccaacgacttacgcttgcttttgtcatatgtcgttaacttgccgtctctcttacattgttgacattcataattatctctttctagcactctttttcttgttgtttgccattctttagacttatagaatcgtatgcgttcgtctttagtcatcataatgtttcaccttatataacttaagtagtatcaagactcatctatacttgatgtgtagtaatgtatttactattagtttgaacatgttcatacctcataaataaaaagacacatcacatagtgatgcgcctcttgttcatgcgtcgtattagcatttaataactttaaatattaatctgatactaacataataaactgttttaatgcggacttacatagggtaaaagtccgctacacataaccaatatactttgctaacttatcgatcagtgcattccttctacgtaatatacttgtcttacttgtaccaaagtaatgtgctatatcttcccattcataacaaccaataggacaatcccaatatctaaaccttaataactcaagcgtatcctcatcactttcatctatcaatctatctacaccgttaactatatttcttaatgtattgtacctgttatcactaaacttctttattgcacatcgttcaatcgggttacccggcaaattacttttgccagctcccgcattatctggttcatgactttcaagtaattcatattctcgcatcttcaactctcttcgatagttatcgatgtgctgaatgtattcttcaagctttttgatatcgtgtttctcaatctttatcattcaatgcaatacctccgataatataaattactttttaatatcgttatttattcgctttaattcaatcctgtattcttttaacccgttgtatcctttagttttaactacttcatcaagtagataatcattcatatatctgagcgcttgtatctcccttgcacgatcactattaatactgatacaaactaatagcaatatagcaaatacaatagtcatagtaatccacatcactcacttacctccgctcgaaagacgtaatcactcggcgcctctacatcatcattagccgtcatcataatatatacttgctcagttacatacttacctaactcatacatcgctagtaagaataataatcttagtatttgcttaatcattttttatctaccttctttacttcgtataagaccggatataaatttaaaaagtgtattctatatccaatcgtcttaacttttactttatcacctacttttaacctagcttgtatgtctgcgctatcaaactttcctttgaagaataagtctgagttttcgatgacttgtttatcatctaatacaatatagaatttgtcctctttatcttgtcttttgttatatttatctgtaattgtcccttgatgtacttctttgttttggtaactagccactgtatagataggcaatgcgacaacaagtagcaatgcggttataccgaataatgacagtattccaacaataaagatgtcgaacccatccatatttttaagttttttaatcatttcccacactcccttatattttcaaacaactgacccactttaataactgcatcccttttaacttgtttctcgtacttctctttcgcttcttctttactctctgcctcaacaactgtaaacctttgattactcttagctttagttatgtgtgtatgtttacgtcctgttgaatctttgaatgttgtgactaagtattgtgtcattcctcatagctcccttgaacttgtttgagcttactcataaaaaacattactaaaaatgctattaagatatgcgtcttttgatgtttataagcaaatgtagatatcataaagatagtagcaagcattaacatttcatatatgtttgtgtgtatagtctttttactcttaagaaaaataattgctatgcgataaaagagataaacgccaaaccctattaaaaatatttctaacatgtcgctcacttccccaaaacctccttgactcgatctaagatgtctttacacgtatccttttcctgcgtctgctgttccatcttgtctttcgtggttccttttcattttctttttgtatgcgtcaatgagttggtcgatagaatataagttgtaagctatgtctatcactataacaattgcttgttggtcgggataaaattctttgaatattatctgtggtgtactaacaactgcgtcttgagcaaattctttatctttaaaattaaacattttgtgaaattctgtatctttaaaacttgattcaatcgcttcttttatctcttctgatgacactcctacttgattcgcaatactcaatccaaacgccaacatgtcagctaattcatcaagttgtacgtctaacggcttacctggtttcttcttccagttcttaaacgtttccaatgtattaaaccattcaaagaattcaactacatatgctattttgctatctcgtaagttcagcgttggtattctatcgtcgaactccttttgtatttgtaataactcttgtaattgatcaattgttaatgtgttattcattttcctgtgcctcctctacattaatttcatattcatcataattaaatgatgcttcaaatatcgcaataaaatccgcctcaatttctgcttcttctaaactttcagcctcgatagtctcttcaatcatgccagcgtatgtgatttggacattaaatttcttcattttcctgctcctcctcatatttatagaccacttgacccgtcataatccctactgcctcatcaagaccaatatcttctttgagtgcatcttgcatagcattaggtaaacccttaagtatttcatcaaacgcttgcgctttcttatatacgtcctcaatctcttttagtaatccctctgtgtcattaccgttatacgcactagcacttataacggactgttcaatttgttcgcggttattcatcatttccatctcctctaaaataaagttagttgcttctgtttctcgtattccaaaccatgttgctttatatatatttctagctcttcggctgtatcaaacgtcttctttacgccttgccaacctggtacgatatgcccgtgaaagtaataattgccgtttgctacatggatatgtgccactcgttcgttatcttgatacagatatctcttagatccaaagaattgatttaggtattctttgcgtgcgttatctgtcatgatctacttcttaactttcacgaatatgtcgttttccatcaggtagcacgcataacgtcctcttggatgtttctgaggcacattaaacaaatgtggcttctttcttcttagctcagcctctttctttcgctttctttccaatttgcgttcgagtctagcttgttccagtctttctattgttttcttttctctgtactcgcttaaacgcgtaccttctggtgcgtccattgcttcatgtagttcccaaccgtcttttactctcttagaaaccattccagcggttataccgtgactttctattaattccatttcagatttggtaaacctatatggtttatcatttattgttacaatccttgcttttctcgccattttatccacctcttatatttcttctattcgtatgattattttgggctcaattccataacgctttgagctagttatttctgcaatttgattgtcatctttccacaaataattgttacaagcgtctagaactgtcttcatcaaattatcgatatctggtttagttacttttaattgtccaatcgcttgagttttctttttcttcgaccatgatttaggtggagtaaagtaaaactctaattcaatttttaatgcattttctagatttagctttggcatttgattttgtaaatattttttatgttctgtatattttgtaggcatatatgtgtgtgcatatctaccttttgtgctaaaacgcggtcgaggcgagcccataggtgcctcgaaagtttcgttaaatttaatttctatctccatgtaatccctcatatatattcaaataagcttgtttggtgtcctaactccatttgttcattatcaataagtgtttttaattcataatcatctaagtaccaacgtcgaccattgaattttgtgtgttttaatccaacaactaaatgccgtccatctttaaaatgtggtgtaactgaaaacattttgttgccgtcatgatcaaatagatagtatttatcaaatgcatccattttcaatcactcccatttgctatttagacgcttaataaaagcttctctgtctttctcaaggttttcatctacttccggcgttttcgtttctctcgtgctgtctgtgagccatttgggtgttttttcttttgattgtttaacgaaaggtttataattttgttttttgctttcaagttgttgcttttcaaatgcacgtacttgttcaatagatttcaagtttgcattaagccaagtattcaaaatgcttttagcatatccccaagtaaccttgtttctgtctttagcgattttaagtgatgcggtaactatttcatctgaatcattttcaaatgaatcaagatagtaatttaaatcgtctaaattgtaaggagttatgaaaccgaatccgttatcttggaagaagtcgaaggcggttaccttcttcttctcattattcacattcttttcattattatctttattatcattattgtttgtgttggtttgatgttgttttgatgttgggttgatgtttgactgatgttgttttgatgttggtttgatgtcgttttgatgttggttcctgccctgctcactttgataaaagtcataattgacaatggttataagggtatattttgatgttgttttgacttctaacattccatcactctcgagtaagtcaaggaaggttttcactttaaatcgtgaccagttaaaaaggtcagacaaggtcaaaatagatgttaatctttgtcctctttcaacggttacaatttggtttcctataggcacttttgcctctgaatgattcgcttccatgagtaaatatatccatgcttcgaactttgaaaatgttctcttttctttaaatagccaatgattttgaattgagcgatcaatacttatccaaccagtcatatacacacctcactttcaaaccggttaaattagaatggtaaatcatcatcatttagttcaatcggaccatttgcattcgcaaacggattatcttttactggtttgttatttgaatattgcgattgtccacgtgtttgttgtacttgttgttgatataaatcttgttgagtgtcatttgagtttttcggttctaaaaattgaatactatcagcaataacttccgtaacgtatacacgttgaccttccttattttcatagttccgcgtttgtaacctaccatctacgcccgccaacgatcctttagataggtatttattaacgttctctgcttgttttttaaatacgatgatattaataaagtctgcctcgcgctcgccttgtgcatttgtaaatgtacggttaactgctaatgtgaatgatgctacatttacaccactttgagtggtccttaattctgggtctctagttaaacgaccaactaatattgttctgtttatcatttataaacctccaacataaacgggcacgcccgtcactttttgtatttcacttttaatgtattttgcatttgaattttggctacttaaatgaattaaatgtatttcttcgagtctagttaaatcatttgcttttaacattccgatagcatgttctaagctaaaatgagactccataattctatttgctaatgtgctgtgcacactgccgttttttatgttttcctgtatttgttcatagatataattaacttctaacatcatgtgcgtaatgccgttaaatttgtatttcaaatactttgtatcagtaacatacagaaccttataacctaatgtactttgtaataagaaagccacaggctcgttagcatcatgttcgatgtcaaacggtagaattgaccatgtgcctattcgcagctcttgctttgccttaatcgtgcataagcgatgactttcaaaattcatagcttgttgtgttccagcagtcatatagctgattacaccattgtcgacaaactgctttgtatactttgcatgatcaccatgttcgtgtgtgataagacaccctgctatatgtcttgttttatatttgaaatgcttttgaacacgttcaaattttatacctgcctcaaatagtaacgtagtacgtccatcatttaagacgtagcagttaccacttgaaccagttgctattgtttcaattaaaatggctcttcttcgctttctttttctgttgcaggttcttttatttcttcaaagtcagatacatcaataggcttatcattttctaattctgtgtattgtgcttcttcaagaactggttgttcaaagtccaattgttcttgatttgcattttcttcaacttctgcgtccaacacttctttgcgttgacgttgttcggattcttgtgcgtatttgaaaatattgctatctgttgatgtgttgatataacgtttagcagctctattgataactgtttttttagccatttcttctttgaaattattatgtgttttagaattttgtaatgctttttcatctttaatcattgatgactgcatccatgcttgtttaatttgttcaatagtcatgacttcaatatagttatctcgtccatcattaaatacgattgtgcagtacgcaccgataatgttttctttgtcgatgttaaagaagtcttgttcgtgtttaatcgctttgatacgtcctgtttctcccatttcttgcttgaatgtatcgcctttataaatcacttgagcaacaacatcttgagcacctgcatcacgttttaacatcattacattaccgtgatagctacgttgtaactgcattttgttgccgtaaggaataaagtagcattgatttttagctggatttaaaccttgcgttaccatgtctaataaggcatttgctttgcttgtatcgttacaactcattaatttgttatcttggctgatttgtaaccatgcttgtttcatggcattacttggtgaataatcatttggcaattccaaattgccttgtgactctaaaactctcactttgtttaatacgttgtcagatacgttcttttcttgtactaattgttgttcaatagtttgtaatttattattttcagtcattttatatagtctccattcttaattttttatcttgttcatttactatcaattgaatttgttgtgattctgttttgataagctctgttactgattcagcattatcaataaatattggcgctgtaactttaaaatgttttgatagtgtgttgatgatatctaagccaacattaattcttgaggcgttatttaaaccgctgtcatactcgacaccattaaccgttgttgaacatgtttcttctaattcgccgttaactaaggtattgaatagcttaaattcagcaatatcaaattcgttattgatgttttcagtaagcattttgacttttgttgttgtaaattcttttaagatataaaggtcatgtgaatacttttctttttcatccaataatctgtcttcttcatttcttaattcagaaataacatcatctagatgtttatttgatttttcgattgatcttgacacttcaatttctgatttttcttgagtaagttcgcttattttgtcatctattcctgaaactttatcttgaatagttttcctgatgttagagcgtttttgattaatctcatttatctctaacattactgctttgtattcgtcagtttgcgtaacgtcaacgtgagttattttcaacttattaattttgttttgtattcttgctgaacgctcttctgcttcgttgattttaatttgaagattattattgtcatcctctaacttctcgatgattggctttattttcttgccttctgaaataatgtgattgatagatgtttgtattgtttctaattctttcgatttttttacattgaatttctgtaaagctttttctcttgcctcattcacttgttcagttggtaactgttgaccacaacaactacatacattgtcatcaagatgttcaaatttttgatttttagatttttctaaatcactttttagtcctttgtgattttccaataattgattacgtctattttcttcatgtgtgatttgttgtttgttttgctttaatctcgttttaaggtttgctaccgttccattttcaacgtgtaattcatttgttaaagcatggattttgttctcattacttgcgctgttattgtcttctatgcgtttcaattctgattgtttatcagctaattgattacgcaaattaatttcttctgcaccgttttgaatatctatacgctcattttcaagttgctcaatttcttgttttatgattgtgtgtctatcattatcgaattccggtacatcctgcttattttgttgcgtttggttaatacgtatcggaatatctttgatatctttgttaatctgttttatcttgtctgtaagaatctttttctttgtttcaatttcgtgatctccaagaatattatttagttctttaaaatcatcatttgttttaatgacatcctcatcattgattggtttagcgatttcaaacaacaaacttcttcgtttcttccaatctagtaagttaaatgcttgagggttcgtaattaacttgaatacatcttcatcaatcagttcatcaatacgagctttataatcctttacttttattgattcatcattgatatattgtttcttcgttcgacttcgtgagtattccttgcgattcgttttttgatttattgtgtatttaggatgtgactcttttttaaaagtcgtaatttttccgtcgatttcaaattctgcgaaaacagtcggaattaactcataattttcttcgtttttttcgtttaaaggtacagggttaaatgatttggttgatccgtccaaacctttatcgaaaagcagccattgtaatgcggttgctgttgtagtcttgccagtcgcattattgccgtatatttttgcatctttaccgtcaaagttaaatttttcttctttgattccagcaaagttcgatatagttaacttatttattttcatatctttcctcatgctccttttttaatcttccgatgacctcttagcacctcgataattaaattttttattcgttcatggctgtctggattgatttcatgtatctgcacaagcttattgtttgttttgtaactgtcgtgatagtgcaagaaattaatcgataagtatccgtgatgattacgttcaatttccaataatgctcgttggtttgacaaagtatattcgtcgaataacgtcttaaaaatattcaatatatttctttctgtatctctcatgcttatacctaccatttcatgactaagttaattagtctgtcctgttcatctgtgttattttcaatccattcataaatactttgtttcaaaatatctaaagctgtgtatagatcgttctcgtcagaaactagtagcccgtcaattgaatttccttcatgatctaaaacgactatttcgacactatatgctcgcttcttaactcttaattgaaaatcaaagccatctacattaaatatttttcgacatacgtcacccgttttgtaatacattgttttagtcctccttgtcgtcatctataccgagaattttttgtgatttacacatttggagaacattgacaatatctttataactcttagtgctatccaataagtaagcaagatcaaaagtatgaccaatcacagaacttgaacctgctaaataatctccgtcgataactcctattgatgagaaaagcaaaatatcaaatttactttctcccttaatttctttcgctaattcatacaattctgccgttttttcagataataagtcttttatttcttcctgcgtcatgtctttataatttttagtcatggttgacttcctccgtttttcgttttatatttaacttgaattttatttcttaaatgtttgttactgttacttgttggcgcaagtagcagtttttttattcttcataaaagtattccttatagaatatgaatgttgcgatacttgcgaatcctgcaattgaccatgctgtagtgaagtatagaaacggcataagtacaatcgctaagactgtgaagcatagtactgctactaggtagcttttataagttttactcatttgttgtgccctcctttgtaaatctcattaaaatgttcatctacaaacttatgcatccttcttgcgttaaacctccaacgattaaaattctcatcaggataatgtacgataccttgtgctcttaactctttttcgagtctagggtgaaataataacctgtctttgattgtttcatcagatgcaatttttaatttcttctttaagtcgctcatgttccatacagggtctaatgagtaagctattaactcttcatattcatcttttgtgataagcacgtgtgtttcaggtattggaactgttacgtttaaaatatgtggcatttctatctttcctttcgtgtataatgttgttatcaacctaaggtagtgataagtatgaaattagatcatgattgtgttagacatcttttgttagaaattgaaactaataaaaagattggtgaaccgctcaccgaatacaatttcaaagataatgttgtatttggaaaatatgattttgaaactgtaatatatgcattattaaaactggaagaagcaaagtatgttagtgttaaattcggttgggaagatggacatatttatggttatacaattaacgatataacttggtcaggacatgaatttttagataatatccgagacaatcacacttggaaagaagttaaaaaagtcgcaaacaaaaccactagtatgtccgtaacattgctaagcaaattagcttttaattatctaacacaaaaatttaatctaacttaaattcttttccatctattaatccataaaagttattttttaaatgcggatgtctttcaagcgtcatttcaataaaacgctggtctatcattaagtcgtagccatcgttgtattgaatattaacgggtcgtctattaccttcttcgtcatagtagtaatagatgacttttttgttttgagcttgcattgttcgttcctcctattaagatgtttgtttttctcctaaaaacttattaacaaagtattgttgtcctttgcctgttacttttggcgtcttactaattgatgtgtgaccgtccgaatgtgtgattgatgtttctttaatttcgaataactcacgttccattgaatactgtgtaggcatgttataatccacacccttgcgtttaataaggaatccgttttgacgtaaccactcaaacaatctgcgttgcccgatgtttataccgttttgtttaatgatctttgctaactctccaactaaaattgatgtcttagtagtagctactgcatctgcaaatacaatttttggtttatcacgttcaatctttgtttctaattgattgattgtgttgttagcaatttttaaagcacgttgcataatcatttctgggctattccatgctttttcaacttggatgaagtattgtcttgcacgtttgccaggttcactacgttgaatcattgcaatctcttttgcagtgtctagtgtgagtgcgtggtcagtttgattctgacgacctcctagtgggttatggacaaaaatgtccgtgactatataatcgatattttcttcaaatccgtaatcactcattctttcaaaccattttttgtatggagtcttaacctctaatgcttgatgaagttctcgaccgctgattgcgatttctccattttctttttcttgtatgttgaacatttcgcctatgttcgattttgtttgtaatgcttgcatattgtttgtgctcctttctgctatactcctattaaggaggtgaatgacttatgactgatgaagctaaatttgtccttttacaactttattcaatttaccttgatagaattgacgaaggtatgtctaaacgtcctgcatcttatttcggtagtgatgaatcctcatttaacgctttctttttaggttttaattttgaagactatatcgatgcagttcttgaattaaagcatagagattttgtaattgcttctgctgaagatggcggttttcttgagatggctctttctcgagaaggtatcgcctactcagaatcagaatccaaaaaagattacaaaacacttatgggtttaattagagatttgaaaaaattaataatctaaaatccaatcatctgctattaaatcgtctgcgctaggctgccaccttccggcggcggtttgtctttttttcttatagtgtctagatacgactaggcattgataacgctgcaaattagttggtaatatcccatacacatcttgattctctctccttatacttattcctttctccatcgctagcttcgttgcttcttgaatgttcatttgttattcctcctattaagatgtttgtttttttttaaatgctaaaataattgatttctttttatcattcgtaaatacgaaattttcgtattcattacctaaaaaaatatcatcatatttaacattaaaagcactcatatacttagaaagtaaactatctttaatgtttgtagagtctttttccatattttgaattgtacgtgatgagaccttaaataaatctcctaactctttttgagtcaatccgtaatcagtcctcaactcttttaatgttttcatgttgtcaccgcctttcgtaaacctaatataatacgaaattttcgtattgtcaacattaaatacgtttttttcgtaaaaaactttactatgatatgaaaatttcgtataataagaaaaaaggaggtaagtaatatgaacaaagaaagaaatattattatagccaaaaacattagaaaatttctcaacgattcaaatatgtctcaaaagaaacttgctgaactcattaacataaaaccatctactttaagcgattatttaaatttacgttccaacccctctcacggcgttatacaaaggatagctgatgttttcgaggttggtaaaagcgacatagatactacatacaaagacgataacgacatcacttccatatacaacaaactcacacctccccgccaagaaaacgtacttaactatgcaaatgaacaattggaagaacagaattctaaaggagataacgttgtagatattaattcatataaacaggagaaaactccagttaacgtcaatggttgcgtctctgctggtgtaggagaacgtttacacgatgaaacgctatttactgaaatggttaaaggacctatccccacacacgatttagcgttaaaagtaaatggtgattctatggaacctatgtttaaagatggcgaaatcatatttgtggagaaaactcacaatataaagaatggacaaattggtatattcatcattgaagaagaagcgtacgttaagaaagtctttgttgaagatgatagattgactctagtttcactaaataaagattacgacgatctacacttttatagaaatgaaagtgtgaggttaattggaaaagttattttataaaaggagcacttgcaaatgaaaaaatatgatattgcagtcttagactttgaaactatgaatgaacatatgaacagcccttgcgaagttgctgtatctttaattaaggatttatcaatagtaaaagtttattcatcttatattaatcctcctaataatagatataacttgaaaaacgctaaaatacataaaatacctgaagatgtcatattaaaagcacctaaatatccagatatttaccaagaaattctctatcttttaaaagaatcacatttaattattgctcataatgcactttttgatatttcagtattaaaaaatactaataattattatgacttacctgttccaaacttcatgtatgtcgatagtataaatatctttagaagcttccacgcaatctctagttttaaattagaaaatttgtgtagcttatatgatatcgataaagaaaaattacattctgctaaatttgacgtgctagctttatcgaagatgttgatatcactcgctaaaaacaatcagcattatagtgtattaaaattaatacattatatgcctaagcaatacattagatttagcaaatattctaactctccaactaaacttttcgattcaggatttcaaaaaattcatatgaaaatatctgagattaataaaatagaagtggaaagtgtaatccctattttaaaagataaaaatgttgtttttacaggtaattttgacactgaaaaacaagatttaatgatattaactagaaagaaaggagcttatatcagaagtgacgtaactgcaaaaacagatattttagtcgaaggtgttcaagatgataaatataaagatgtgaacggactagtttcaaaacaacgaaaagctcgagaatatgttggaaatggtgcaaaaattcaatttttaaatgaagaagacttaataaatttaataaaggaataataacgatgatcaaaaaaatttttacaaaaaagcatgtattcttagttatagaagatgaaaaccataatcacagtgatgctgtttttggaaaaagtatattactttcaatttacgtcggtgtgaataaaaagactaattctaaatcagggaaatttatataccttgacagatctaaaagaatcgttagacaatctgatatcaccaaaatagaatcagctaacgaaaatgatgtagatttttataatttactgaagaaagaaaaggaaattgtttattccaaaaatatagtagataaatacaatttagcgaactatataatttactacgaagttagtactaaagaataaaccaatccattatttcataatactaaccttaaatttacagaggttttaattatgaaacatgaaaaaagcaatcttaactttaagtcttatatttattacctactacctcacttttaaatatatgtggattaaagaattgaagtattaattatgcttatttaaaaaagacgtctatttcagcagtgtttgaaaggaagtttataatgaaaataactaattgcaaaataaaaagagaaactgtaatatacgaagttttaactagtggtaatcaaccattcacttatgagttacctaaagatttatcgtcacataatgcgcgtaaatacttggaatttatttcacaaaaattagatggcgataagttaaccaaagaagattcattatgattttactaaacaaaaaaacgcctactagtgtgaaaacgtattgattaatagcgcctatatggagttttaatataaaaagtaagcaaaggagaaatgagaatgaaaagattgttaggtttattattagtgagcacgttagtgttaagtgcatgtggaaatgatgagaatcaggaagaatctaaaaaagaagttaaatcaaaagaaaagaaaattgagaaggaaaaggaaaataaatcgaaaaaagataaggaaaaagaagttgcaacacaacaacaaccagacaatcaaaccgttgaacaaccccaatcacaagagcaatcggttcaacaaccgcaacaacagataccacaaaatagtgttcctcagcaaaatgtccaagttcaacaaaacaaaaagcaaaaagttgatttaaataatatgcctcccactgatttttctacagagggtatgtctgagcaggctcaaaaacaaattgaagagctttcaatgcaaaaagactatcatggtctgtcacaaagagaatacaatgatagagtttctgaaattataaataatgataattgattccacagggtagcccgcctacccttattattttttgccaattttgaggagggaacgcatgaaaacacgttgttacgatggtaaaaaatggcaatatgaatttaagcatgaaggaaaaagataccgtaagaaaggttttagaacaaagcgtgaagctaattctgctggactagacaagttaaatgagttaagaagtggttttaatatagataactatataactcttgaagaatacttcgaaaattggattaaaacatataaacaacctgttgttaaagaaaatacctaccgtcattatagaaatgcattacaacatatacaaaaacataaaataggtaaaatggagttatcaaagataaatagacaagtttatcagaaattcataaacgactattcaaaagaacacgcaaaagaaactataagaaaaacaaacggtgctattcggtcagctttagatgacgcattatatgatggacttatttttaaaaaccccgcttataaagttaattataaagccggaaaacctacgaagtcagaacaagaaaaattcatctcggtaactgaatatgaaatactaaaagatcacgtcagaaagaagagaactcgttcatcattagcgctattcataatgatttgtacgggttgtcgtgtcagtggtgcaagaaatataaagattgagcatatcaaccaagtgaaaaacactatatttattgacgagcgaaaaaccaatacttcccctagatatatcagtatcgctaaatctgatatgaaacacattatggacgtcataagtacatttgcaattagctatgatggttacattttcaaagaaggcggatctataattaaccttcatgctatcaataatgctttgaaatcagcctgtagagtcaataatataccaattattacatcgcacgcattaagacacactcattgttcttatttactagcaaaaggtgtatctatacattacatttctaaaagattaggtcataaaaatatagcaataactacatctgtgtattctcatttgttagaagaaaaatttaatgaagaggacaaaaaaacaactaaaattttagaaagtatgtaatttagggacccattagggactccaaacccaataaatactgttgttacaaggtttctatgtatccaaactggggtcaatataagcgtgctgatttaattggacaatcttcttacatcaaaaataatgatgtcgtcatatttaatgaagcatttgataatggtgcatcagacaaattattaagtaatgtaaaaaaagaatatccttaccaaacacctgtactcggtcgttctcaatcaggttgggacaaaactgaaggtagctactcatcaactgttgctgaagatggcggcgtagcgattgtaagtaaatatcctattaaagaaaaaatccagcatgttttcaaaagcggttgtggattcgacaatgacagtaataaaggctttgtttatacaaagatagagaaaaacggtaagaacgttcacgttatcggtacacatacacaatctgaagattcaagatgtggcgctggacatgatcgaaaaattagagctgaacaaatgaaagaaatcagcgactttgttaaaaagaaaaacatacctaaagatgaaacggtttatatcggtggcgatttgaatgttaataaaggtactccagagttcaaagatatgcttaaaaacttaaacgtgaatgatgttctatatgcaggacacaatagcacatgggatccacagtcaaattctatcgcgaaatataattatcctaatggtaaaccagaacatttagactatatatttacagataaagatcataaacaaccaaaacaattagttaatgaagttgttactgaaaaacctaagccatgggatgtctatgccttcccttactactatgtatacaatgatttctcagatcattatccaatcaaagcctatagtaaatagcactcaactaactaataactcgcttcgttctaaaaggtcgaagcgagtttttgttgaaatatgaaatgactaactttaaataggtatctcttcattaatataataacttccgctacacttcaacatggctcatatgccatctaacaacatcaagttagtttactcaacataaaagatacagtatctcaaactatctatcccaaaataaataaaaagttacctactacgcgatacgcagcaggcaacttgcgaaaacttatttcttttctttatcattaaatgttttaattaattttacatcatgtgtcttccaatcaacttcatataatgctgataatttttcttctttttgatctacatggttttcaccagaccaatagccccagaaaccatgtttgttccaatctaatttaaagtcatccattgatcgtttataatgaacgataaatcttgatttacctttatcatttttatcgtgtgacattacagctaaaaattctggattaaatccttctgacacagttacaggcattttatttttaggcgtgaaattatctttcgcccataagtttccgtttcgagttaatgaaaagatttcacttttcactctatcatcactgtcattagttagttgtctcgtatgatcatgtcccatattattgatagaatgtgcttctactttccaagctacacctttatttgttgtaggttgatcaataagtgtgcggtaagatggttgttgataactaattgtctctgaataatttttctcttttgtaatatttccagttaaaccgccacgattaattgaaaaatctccacctgttttatagccatacgtatatttaacttctcttgattcatcttgatttttaggcgcaaaatcagtcacatttgtactgttgttgttatcatcaacgttttgaatcgagactgaataagaaccaggccatcttaatgtactattccaataaccatttggatttaaaattttcaatccactgccaattgtacctttcgccttaataaatactgtctctttatcataatttggctcagttaaaaaattaaattgtaagctttgtgagatttttttctctgtatcactcgttgtagccgtacgtgtatacatcttcgtatcaccatcaaggttcttctcggaaactgtagtaattttagatttaatttctgcataagaagatgctgggaacacagttaaagctgttgatagcgccaaactgcagattgtaatatttttacatacttgtttaatcatttgtcatccgtcccttctactttatccttctttatatggtttattttgatcagagtatttttcaacgactttaactgttttatttttccaatctacttcataaactacaataaatctttgaccatctttattttgttctaaaattggttgtccataatgtataccaggtttgtttttcaaaatatcttgattacgtgtatatgtaacttcgaatcgtgttttgtcatttgttttttcattagaaatataagttaagaattctgggttaaatccgcttcttacaagcgcaggatatctatattttgacgcaaaacttaattcaggattttctacagtagataatctagtatttctatagaataagaattcatcatttctgttcttaatttcattcccgtattttaaatcgttggcaacaacagaccaatgtacgtgtctattattatttttaccgctcgcaattgtgtcgtaattttgttggttataactgatagatttagaatagctattagatgatgttcgtccaataccttttgttgaatcgaatttaccacctaagctataagaaaatgtactatctactttcgcagtggaaattttattttttggcagttgatctaaaatttcagttttagggtttctttgtacttgaaaatcaacgtgatattcactcgggtattttaaccatgatgcgtttgtttcatttcgatgagattcaaactttaaatttgaatgaattgacccttgttttttgacaagtaagacattcttgtcatatgttggatcatcgataaagtcgaattgtaaattttgtaaaatatttgtctctttatcgtattcagatacagtacgctttgtaactttaccgtttttaccaatgtcatcaggtcctggtgtatttttatctttatcattcacattacgcttttctttttgttgagccttatcaacatgttctttcttagtttggtcttgtgagtctttattcgctgaattcgcttctgtatttgctgctgataacaataaaagtgcacatgataatgatgacgcaatgaatacgcgctttttatttttcattgttataaccttctttcttatatttaatattgttgataggtatcgacatgtgaataatatcacaaaaactaagaatatatatttaactatttattaaatgattttgtttatattattaaatacttttttcgatataaaattaatgtgtgtacaaagtgattaaattagtaaatccctttatttcgtagttaatcaccacggatctatatgttatacatgctttaaataaatattttttatacaatccgactggacgatttacaataaaaaaacacctgctatcagtgattattagactactgatataaggtgcatattttaagatgcaatcatgaacatagcacgtcactttgttacttaaaattaatgtttaaatacaataattatgtttatataaatatatatactattttgtaaaggtgtgagcttgatgacaacttttagtgaaaaggaaaaaattcaattactcgcagatatcattgaacttcaaactgagaacaacaatgaaatagaggtttgtcattatttaaagaatttattcgacaaatatgatattaactctaaaattttaaaagttaatgaacagcgcgccaatatcgttgctgaaatcggtagtggctctcctatacttgcattgagcggtcatatggatgtcgttgatgcaggaaatcaagataactggacataccctccttttcaattaactgaaaaagatggcaaattatatggtcgaggcacaacggatatgaaaggcggtctgatggctttggtcatcacactcattgaattaaaagaacaaaatcaattgcctcaaggaaccattagattactcgctactgctggtgaagagaaagagcaagaaggcgccaaattattagcagataaaggctatttagatgatgttgatggtctaatgattgctgaaccaactggatctggaatttattatgcacataaagggtctatgtcatgtaaagtaactgcaactggtaaagctgtccatagctcagttccatttattggtgacaatgcaattgatacactgcttgaattttataatcaatttaaagaaaaatattcagagcttaaaaaaaatgatactaaacatgagttagatgttgcgcccatgttcaaatcattgataggaaaagaaatttctgaagaggatgcaaatgatgcatctggtcttacagctgtatgttcgattataaatggcggcaaacaatttaactctgtaccagatgaagcttcacttgaatttaacgtaagaccagttcctgagtatgataacgactttgtagaatcatttttccaaaatatcataaatgatgtgaatagcaataagctttcacttgaaattccaagcaatcatcgtcctgtcacaagcgataaaaatagcaaattaattactacgattaaagatgtagcttctagttatatagaacaaggtgaaatctttgtttcggcgcttgtaggtgcaacggatgcttccagcttcttaggagataataaggacaatgttgatttagccatttttggaccaggtaatccattaatggcacatcaaatcgatgaatatattgaaaaagatatgtatctgaaatatattgatattttcaaagaggcttccattcaatatttaaaggagaaataagaggtatactgtcagctgccctattcgggtgctggcagtttttattgcgaattttaagtttttgagctggaaaacaaaattttgacgacgaattatttgaatgtaaatattcaaatatcaacaagcatatttccattgaataggtgatgtaaaattaaaactatagtgctgatttatcatacatatattgcattgtctgttgaaatttggaatccaatttctcttttttgaggctcccaccccaacttacattgttcgtagaatttcttttcgaaattctctgtgttggggcccctgactagaattgaaaagtaatacacatcagtaacatttcttttttcgtttatgatattatctaattattaatttataatataaaggagtatgcaattaaaatgaacaaagtccacaaacctttatatttttatttaatgcttttcttctctacaactatcataggtgcacttttattgtatttacctttcactggtaaaaagccaatatcttttttagatgccctatttatagcttcaagtgcatttacagttactggcttgtccccagttgatataggatcacagtttaatatacttggtgagatagtaatactattattaatacaaataggtggtctgggtatcgtaaccgtaacactattgacactagtatttttaaatagaaagatatcaatgaaaaatagattcttgattatggttacatggaatattgacgaacctggtggtgttattaaactaattaaacacttggctatttatagtttagtcactgaattaattggtatgatttgtttgtgtttatcttttataccaaaatttggtataggcaaaggattatttttaagcttattcacatcagtatcagcttttaataatgctggatttgccctttttaagaataacttaatagatttttctaatgatccaattgtcattatcataatctcaatactcatagtatttggaggtattggacattttgtcgtaatagactttattaattgtaaaaaattgagtaaattatctttacattctaaattagtcttaactactactagtatcctaataattataggtgctattacattctttttattagaacagtttaatactatgcaacatatgggactagttgaaaaaatcggaaattcttttttccaatcagtaacaacacgaacagcgggttttaacagtatagatatagcaagcattaacaaatctaccgccttaatgttaatgctactaatgtttattggtggtgcccctctcagtgcagctggaggaattaaaataactacttttgcagtagcgtttatttttgtactaaattatatacgtaaagaaaataatgttttcgtattcaataaagaaatatctgacaaacatataaaactatctattgttaccattaatatctcatttctatttatcagtatcattacttttatattatcgataattaatccgaacatatcattaatcaagttattattcgaagtggtttctgcatttggaacagtcgggttaagtatgaaccttaccacagaatatcacggtattactaaaataattattatattcgttatgctttgcggtaaagtaggactattaactttattaagaacatttataccaccaaaaagtcctaaaaattaccgctacactaaaggacaaatttatctataaagtagctatcaatctttaaacaagaaatgaactagtgttttaatctattacattaaaaaactacctgaacaggtagttttttgttattctgtatttattttaggacgataaaatgccttatctttttaatgaagcaaaatgcataaacacacctaaaaagagatcaactcaaaactaaactatacctagttaactgcttgtgattaagaaattttaaatgtggtttcaatcaataaggtcacccacccattagaattttaatcaagcagtcattccggaacacgcaatatttattacttattgaagttgatgtactctcattaggtaatacaatatctcctgaacctcaatgatttaaataccattatgaatccaatgacaaatcatcataaaaaaagacgctttccaaaagttttggcaactaatggaaaacgtcttaaaaacatattttcatacgttctcatatttatttgaaacgaatcatactcgtctatcatggaatgttctagttagtctaaactagaaactgttttacatcattcctggcataccacccatgttaggttggtcattatttttttcaggaattgaagccactactgcttctgtagttaagaacattgccgcaacacttgctgcatgttgtaatgctgagcgtgttactttagttggatcaacgatacctgcttctaacatattaacccactcgtttgtagcagcgttaaatccaacacctggttctgcatttttcaagcgttcaacgatgacagagccttctaatcctgcattttcagcaatttggcgaactggtgcagttaatgctttaagtacaatattcacacctgtttcaatgtcgccttcagcttcaatttcacttactttttggtaaacatttactagtgcagtaccaccacctgcaacaataccttcttcaactgctgcacgtgtagagtttaaagcatcttcaatacgtaatttacgttctttaagttctgtttcacttgctgcacctaccttgataactgcaacaccgcctgctaatttagctaagcgctcttgtaatttttcacgatcaaagtcagattcagtttcttcaatttgagatttcaattggcttacacgtgcatcaatgctgttttcgtcaccgtcaccatcaacaacagttgtattatctttagttacttctactttacttgcagtacctaacatatctattgatgcatcttttaaatctaagcctaaatcatcagtaatcacttgcgcaccagttaaaatagctaaatcttcaagcatcgcttttctacgatcaccaaaaccaggtgcttttacagcaacagctgtaaatgtaccacgcatgcggtttagtacgatatttgttaatgcatcgccttcaacttcatcagctacaattaagattggacgattagattgaaccacttgttctagtaaaggtaagatatcttggaatgatgagattttcttatctgtcactaaaatgtatgggcgttctaattcagcaaccattttatctgaatcagtaaccatatacggtgattgataaccacgatcaaattgcataccttcaaccacttctagttcagtgtttagtccatttgattcttcaattgtaatgacaccatcgttacctactttttccatagcttctgaaatatagcgtccaatttcttcatctgctgctgaaatagcacctacttgcgcaatttcatttttattttcaactttttgagaattttcatgtaacgcttcaacagcaactttaactgctttgtcgataccttgtcgtaaaccaactgggttcgcaccacttgtaacatttttcaagccttcttgaatcattgcttgagctaatactgttgcagttgtcgtaccgtcaccagcaatttcatttgtcttatttgcgacttcttgaactagtttagcccccatattttcatatggatcttctaattcgatttctttagcaatcgttacaccatcgttcgtaattaaaggtgctgtaaactctttatctaatacaacattacgtcctttaggaccaatcgttactttaactgcatttgctaattggtcaacaccgcgtaacattgcttgacgtgcatcttcagagaatttcaattgtttaaccataaatgataaacctccatttgtttagtcatatttcattttcgttctttacaatctatctatgaattatattctatattattcaattaccgctaaaatatcttcttcatttaaaactaaataagtctcattatctcgtttaacttctgtacctgcatattgttggaacacgacacggtccccttctttcacttcaggagtcactcttgtaccatcatttaataggcgtcctgttcctactgcaacgataacgccttcgtttgatttttctttagcactatcagttaaaacaataccacttttagttgtttgttcttgttcttttttctcaataatcacacgatttccaattggttttagcatgattgttcctccttaaaaaacctaaagtttagcacttaactttatagagtgctaacatacatttataataatcaaatttggtcaaaacttcaagtcataacctttcaattaagttttgtaacttcaagttatttacgataaaataaattataaacaaatatttggaggaaaattatgacaagactatgggcatcattgctaactgttattatttatatattgtctcaatttttaccgcttctcattgtgaaaaaattaccatttgcacaatatagtggcatagaactgactaaagcagtcatttacatacaacttgttctatttttaatcgccgccacgacgattattttaattaatttaaaaattaaaaatccaacaaaattagaattagaagttaaagaacctaaaaaatatatcattccatgggcattgcttggatttgcactggtaatgatttatcaaatggtagttagtattgtatatagtcaaatttttggcacacaacaaacaagtccaaatactgagcgtttaatcgttattgcacgaaagattccattgtttatctttttcgtatcaatcgttggtcctctattagaagaatatgtatttagaaaagtaatctttggcgaattatttaatgcaattaaaggtaaccgtatcgtcgcatttgctattgcaacgactgtaagctcattaatctttgcattagcgcataatgactataaatttattcctatttactttggtatgggcgtcattttttcattagcatatgtatggacgaaacgacttgctgttccaattattattcatatgttacaaaatggatttgtcgttatattccaattacttaatcctgaagctttgaaaaaagccacggaacaagcgaattttatatatcacatttttattccataatataaaaaacgaatcacacacggattatcgtcgctgtgattcgtttttatttttctttttatttcgctttacaaataagaatagcatgattgaaaataccaccatcatagaacatacaattgctagccaacttttactatatgcagttgacgcacttttcttattatcttcttgttttttaactactgtaaaatcgtctttttcatgcggctcaaatgaacgttgttttgaatccggcttatcttcgggctttttcaaatctggcattgatccaatttcaccagtaattaatgcgagtacttgttcatctaaattacgatagtacctttctgatttcaatggattgaaatattggaatctaaagtaattcgattgctgttgtaatccatttaaatatgcatttccgctgaagttttgtttgcgaataatattataaatgtcttcatcagtaacttctccatattctttacccaattgattaatttgatttaaaatatacggattatacttgtaagccccattcgccaaggctaaaaatcgttgggatacaaaatcattaccagtaggattttgtaagtttctttgatttccatttggttgccattgaccttgattagatccatctgaagcatttgggttccatgttcccccatttttcgagccaccagaatgattggaatccccaggttgattgggatttggagacggatttggatttggcttattagggtctggttttggattcggatttggatctggttttggttccggatttggcttcggtttgtctggatctggttttggatccggatttggtttcggcttatctgggtctggctttggttccggatttggctttggtttatctgggtctggttttggattcggatttggtttcggcttatctgggtctggcttcggattcggacctgggtttgggttatttgagtctggcttcacattattcgaatcaggattagcatcacgactattcgaacctgttccttcatcacccgtttgatttgattcgtgaggtgtcccagtctcattattattcatttcactatttactgatggcgaagttacattatgattcaaattagtcgttggcttttctccatttaagttatcctttgcttcaactgtgtgcgttgcaagccctatactactactacttaaaattaacatacttgttgaaagtaacattttcttaaaccaatgatatgacatttcacgagacacctccctttttcatataagtattaatctaagtataataaatatgcgttgaaaatgcatttatatttggaatttgaaaatgaatattaatattcttgaaattttcgtaaatattactttacaagttcgagtataaaatttatactaagtctattaagtattctttactaaagaaggagtaatgattatgggtttatttaaaaaagataaaaaagcaatgacttttgacaacgcattggaagaaagacgttcaatatataatttgaaagattcaatatcaattagcgatgacgaattagaatcaatgattgcacatgcagttaaacatgttccttcatcatttaattctcaatcaactagaattgttctcttattaaatgacaacaataataaattttgggataacacaaaagcaattttaaaagaagtcatgggagagaatcgtgatttcgagccaactgaacaaaaaattgataacttcaaacattcatacggcacaattttgttttatgaagatcaagatgttgtaagtggtttacaagaacaaatgccaaactactatgataattttgcaatatggtcaactcaaacaaatgccatgcatcaatttgcaatttggactgcattagctactaaaggcataggtgcttcattacaacactataatccacttgttgatgagatgacttcaaatgaatttaatattcctaaaagttggaaacttattgctcaaatgccatttggtgatattcgtgaagctgctggcgaaaaaacatttaatccagtggaagatcgtttcgtaataaaaaaataatcaatatattgttgggaatggtacagaaatgatatagaatcattagttattcattatgtagtagttcttacacattagccgctgctaatgtgtacttaagaataggaatacatgagtaaaactcatgtataagaaatactaatttctaaagaaaaagtatttctttacgttagagcccaccccaacttgcattgtctgtagaaattggtgttctaatttctctatgttggggccccatcaactactgtcaatatagcattgtagagcctaggactttgattttatgtcctgggctcgttttttgcgtttcaacataacttttagtaagttatatataagatctatcaaggaagtgatgttatgaaagtccaaatttatcaattaccgattatttttggagatagttctaaaaatgaaactcaaataacacaatggttcgaaaaaaatatgaatgctgaagtagatgtagtcgttttacctgaaatgtggaataatggctatgatttagagcatttaaatgaaaaagcagataataatctaggacaaagtttttcatttattaaacatttagctgaaaaatataaagtcgatatcatagctgggtcagtttctaacattagaaacaatcaaatatttaatacagcttttagtgtgaataaaggtggccagctgattaatgaatacgacaaagttcatttagttcctatgttaagagagcatgaatttttaaccgctggcgaaaacgtagctgaaccctttcaattgtctgacggtacttatgtgacccaacttatctgttatgatttacgttttccagaattattaagatatcctgctcgtagtggtgctaaaattgcattttatgtggcgcaatggcctatgtcacgacttcaacattggcattcattactaaaggcacgtgcaattgaaaataatatgtttgttattggaactaatagcactgggttcgatggtaacacagaatatgctggtcattcgatagttataaatccaaatggagatttagttggagaattaaatgaatccgcagatgttttgactgtagatttaaacttaaatgaagtagaacagcaacgcgaaaatatacctgtatttaaaagtattaaattagatttgtataaataagaagcgcctgaaataatatttaacacatgtcatgactaaacatagatttatgagagatttttcataagtctatgtttatttttttataatagataactcagtaagaaccaatttcacacttagcaaatgaatgattttcttaattaaattgattatttttttgaccttttccaacattagaattattcatatattttaacggtggatctcataatgaggattaactcatcccttctttattacaataaaaaaaggccgcgagcttgggaggggctcacgaccatacttattattaagggaatgttttacagttattttttcaatctatttttggggatgttattaattatgaaaaaaattttatttatcaaataatgataaatcgatgttgtttacgatagcttacatgctagaaataattatctgtaatgataattaagaaaaatacatagcactgagtccaaggaaactaactctactagcaaatgttactcacttgctaattttacatggttattaagttgggatggcttaataactcatacttttagtactatacgaagataacaaatttacaatgaaagtaattaattattcatcttattttttagtgaatttgttcactgtgtcgataatccattttactaagtcaccgattgttgaaatgatatcttgtgccattgaaatcactccttccttaattaagataaaaattcttaaaattaaacaactcatcaactattttccatcacatctctgtgatctagttatattaaaacatgctataagcatttattttccattttttcttaactagtcgttttttattcttaactgtaaattttttatgttaaaatattaaatacaaattacatttaacagttaagtatttatttcctacagttaggcaatataatgataaaagattgtactaaatcgtataataacagtgaggagagtggtgtaaaattgaattattttgataacaaaattgaccagtttgccacgtatcttcaaaagagaaataacttagatcatattcaatttttgcaagtacgattagggatgcaggtcttagctaaaaatataggaaaactgattgttatgtatacgattgcctatattttaaacatttttctctttacgttaattacgaatttaacattttatttaataagaagacatgctcatggtgcccatgcaccttcttccttttggtgttatgtagaaagtattatattatttatacttttacctttagtaatagtaaattttcatattaactttttaattatgactattttgacgtttattgctattggtttgataattaaatatgctcctgcagcaactaaaaagaaacctattcccgttcgacttattaagcgaaaaaaatattacgcaattattgttagtttaatctttttcattatcacacttatcatcaaagaaccatttgcccaatttattcaattaggcatcataatagaagccattactttactacctattttctttattaaggaggacttaaaatgaatacattatttaatttattttttgattttattactgggattttaaaaaacattggtaacatcgcagcttatagtacatgcgacttcataatggatgaagttgaagtacctaaagaattaactcaattacacgaataataaaaatagaaagtgtgatagtaggtggaattattaaatagttataattttgttttattcgtattaactcaaatgatattaatgtttacaataccagctataattagtggtattaagtacagtaaacttgattattttttcattataggaatttcgacattatcgttatttctatttaaaatgtttgatagcgcgtccttaatcattttaacttcattcattattataatgtattttgtcaaaatcaaatggtattctattttgttgattatgacttcacagattattctgtactgtgctaactacatgtatatagttatatatgcatatatcaccaaaatttctgatagtatatttgtaatattccctagcttttttgtagtttatgtgactattagtatactattctcatatataataaatagagttctcaaaaaaatcagcacaccatatctaatactaaacaaaggatttttaatagttatttcgactatcttactgcttactttttcattatttttcttttattcacaaataaactcggatgaagctaaagtaataaggcagtattcttttatttttattggtatcactatatttttaagtatattaacatttgttatttctcaatttctacttaaagagatgaaatataaacgtaatcaagaagaaattgaaacctattatgaatatacattgaagattgaagctatcaacaacgaaatgcgcaagttccgtcacgattatgtcaatatcttaacaacgctttcagaattcattcgagaagatgacatgcctggcctacgtgattatttcaataaaaatattgtacctatgaaagacaatttacaaatgaatgctataaaattaaatggtattgagaatcttaaagtacgtgagattaaaggcttaatcacagctaaaattttacgcgcccaagaaatgaatataccgattagtatcgaaatacccgatgaagtaagtagcattaatttgaatatgatcgatttaagtcgcagtattggtattattcttgataatgcaattgaggcatcaactgaaattgatgaccctatcattcgcgttgcatttattgaaagtgaaaactcagtaacgtttattgttatgaataaatgcgctgatgatataccacgcattcatgagttattccaagaaagtttttctactaaaggtgaaggtcgtggtttaggtctatcaactttaaaagaaattgctgataatgcagacaatgtcttgttagatacaattatcgaaaatggtttctttattcaaaaagttgaaattattaacaactagccataaggatgtgaatgtatgaaaattttcatttgcgaagacgatccaaaacaaagagaaaacatggttaccattatcaaaaattatataatgatagaagaaaagcctatggaaattgccctcgcaactgataatccttatgaggtgcttgagcaagctaaaaatatgaatgacataggctgttactttttagatattcaactttcaactgatattaatggtatcaaattaggcagtgaaattcgtaagcatgacccagttggtaacattattttcgttacgagtcacagtgaacttacgtatttaacatttgtctacaaagttgcagcgatggattttatttttaaggatgatccagcagaattaagaacacgtattatagactgtttagaaactgcacatacacgcttacaattattatcaaaagataatagcgttgaaacgattgagttaaaacgtggcagtaattctgtgtatgttcaatatgatgatattatgttttttgaatcatcaactaagtcacacagactcattgcgcatttagacaatcgtcaaattgaattttatggtaatttaaaagaactgagtcaattagatgatcgcttcttcagatgtcataatagctttgtcgtcaatcgccataatattgaatctattgattcgaaagagcgaattgtctattttaaaaataaagaacactgctatgcatcggtgagaaacgttaaaaaatataataagataataaagtcagttaacggcgtattcaattgtaaatcttgttggattttaacaagataactagcaaatgcactgtatagctggctttttatttttaataacaacattaaatatgacgcgtgaattaaaaaatgatgtaacgtttctttgtatacctattcctattactacataatttatcaatttctatttcactctacaatcctatggcgcaatttttaacaaaatatactaaatttgaaatcgacagtttccttaaataaaatgctacattttcttacccaatgaatcttattttgctcgcaaaaaaacagtgtggcacaagattcaacttgtttcctacactgttttataaatgaattatttaaaatgcttgttcaacctcttgtaatgttggcaaactattaatagcaccatacttcgttgtcactattgcagcaacgctattgctaaacgctaaaatttcctcaccttcattttcaaataactgagttaaatttaacacatcggttgctaaaatcctgctaataactgcaccaataaaggcatcccctgccccagttgtatcaacaggttttaccttatagccactatgataatgattaataccatttttcaaatatatggcagcaccatctgctcccttcgtataaatgactacagtaacattacctttaaataatgattgaatggcttcattttcatcatcaatatctgtaataaattctaattcttcatctgaaacttttacaatatgtgccaatggcaaaaaggtatgaatagtttgtcttaaatcttcagcgttatcccataatggcaatcttacattaggatcaaatacgacagtaccatttgcatttaatgttttggtaatcaattgataatgcgcatctctcatcggactatcgaccaaatcaacagaacaaaaatgtactacatcgttttcattcacatcaatatcattcacaaaacttggttcaaataacatatcagcagagggcttacgataaaaagaaaaatctcgctcgcccgcttcagtcaaactcacaaaagctaatgcagtgtttgcttcattcgtgcgatacacgtttgatacatctacaccaatacttgaaatcgtttcaacaatgctatctccaaatgcatcattacctaattgtgtaatcatatgcgcttgttgtcctaacttttgaactgtacaagctacattgcatggcgcgccaccaatttgcttcgtaaatgtttgaacatcttttaaattcgcatttgtaatatttggaataaaatcaattaacgcttctcctattgaaaataaacgtctcatttatgttcatcctttaaatcatatttagtaaattgtaaatatacttgccctgattctgttgatgttttaatacctagtgcgtcttctgtcgggaaaattcgagatgtcaaaacacgttccccatcattacagaaaatttctatactagatgtatcaacaaaaatttgtaattgctttaatggcgtgtctaatattgtactacgcgtcgtaccttcaacatttgtcggcaataaaccactgtcgctgcgatctaatgttattttattttcacgcttgttataagcgattaatgttgaagaagtcttagacgtacgtaattcaaagtacacttcggtagcatcattgtccaaaatatctatgattaattcatactgtttaccttcgtacggatgtaattttcgagtaaatttatttgcgtagcctaatgctgtctctttattgtgacgtaatttttccaatgctggatatggacgttgcttaagttgaccattttctacatttaatacacgaggaattgttaagcaatgggcccatccttcattatcagtaggatattcgatttccggtaaccccatccatccaattagtactcgtcggcctttttcatctaaaaatgtttgaggtgcatagaaatcaaagccattatcaagctcgacaaaattttcatgttcatatgttaacttttcaatatcaaacgttccaagtatataaccactttgataaatattgttgaactgatcgtcttttggttcaataccttgtggacaaataagtatgacatcttgattatctacattaaagtaatctgggcattcccacatatatccaaaatcatctaactctgtatttatttcacctaaataatgccaattaattatatcttcagtattataaagtaataatcgaccttgctgatcattattttgtgcgccaatgatcgcataatatttctcaccatatttaaaaactttaggatctctaaaatgactcgtatatccttctggttgctggctaattactggctttggaaacttttcaactgaaccgtcttctttcaatcgtgcgatcatttgactcgcatggcgttgccaatgattatctcgatgatttcctgtgtacatataatataaatgcccgttatattcaaaagcactaccgctatatacaccatggctgtcatatttagtatctggatttaaaattggcccttcagctttaaagtttattaagtcatcactcgtgtagttataccaatactttaagccatgtactgcgcctaatgggaaccattgatgtgaaacataatactttcctttataaaaaataagtccgttgggatcgtttaataagcccgtttctggttgtatatgaaattgttgacgaaattttgattgatcaacttgttgttttaatgttttaaaatactcagtatcaacgtcctcgattcgttgataacgttcttctctagtccattcggtcataatatttacccagtcctccttttataatttatgctgttaacaatttatattctattatagcaaattttacctacgttctttaacttttaacctatccatttatacttttatggtatcggttccacatttattttaaaaaatacagcgtctaaatattaacatctactgtgacgctatatggcatatcttgctttttaagcatctgttgtatctcttccatcgcgcatttgccagcttcaaaataattataatgaattgtttttatcgatggagacactaattgtgtcattgggtcaccaccaaaaccatatatttgatgtggtttcataacatcttttttatcagaataatatttataggcagctaatgcaatcgtatcagttgcaccaacaaccgcatctacttgctccacattttccaaaacatttgcaacatctttttgtgcttccacataagtaaaatttgtttcatgtatattaggtttaatttgatatttggctaactggtcaagtaaaccacgttttctatgtataccaactgcaatatctttttcactcacactaaacacttcaacttgttgatatccctgttgaccaatccattcacctataatttgacctgctttataatcatcatgcacaatactatgaagttgttcatgttgttgaccaacaataacgattggtacattcattttattaatgacttcaatatgtttttctgttatgtctgtagccattaaaacaataccatctactttactgcgtgctaatgtttcaagcgcttgtatttctgcttcgatatttaaacctgtataatttaaaattaattgtgattcatatttttggcattgttttgccaatcctttgattgtttcatctactgcatatgaattcattctaggtataatggcaccaataaggtgtgtttgtctcgctcttaagctttgagcaaattgattcggttgatagtcatgctctgctataatttttgttaatttttcacttgtttttttacttatagatccattatttaaaaatctagatactgtactttttgaaacgcctgccaatttggcaatatcagatatatttttcatacttattcacctatcattatttatgacacttagccttattttagcatatgtgtaaccgctttaaataatatttctgcttctttcataaaaagatttcaaaataaaatttctgtataacaaaatgtcccaacatcaacctttagttaaatgtcaggacaatgaatattctatgtatatataaatctaatatcgaatatgtttattgaatctatttagctcaccttcaaagtaagcatgttcaccgtgaacaatcttgtctaatcctatattcgtttcctgttccgtaacagataatggtgtaattaatttaattactttcgcaataataaacgtcatgacgatactaaaaattacaactgctgttacacataatatttgtacaagtacaatatgtatgtcaccagtataaataaagccattctcaatgtcaggatttgcctttttactttggaaaaaggctgttaatactgcaccaataataccaccaacaccatgaataccaaatgcatctaatgcatcatgatattttagttttaccttgatgtaattaataacgatatagcaacagatacctcctattaaagccatgattgttgcactaagatatgttacatatccagctgcaggtgtaataacaactaatcctgctaatgcaccgagtaaaagtccaagtaaacttgtcgtctttttaaaaatatattctaaaattaaccaaccaatagccccggcactggcagaaataactgtattcgtaaatgcaagcattgcaatttgatcaaatgtaaaagcactgccaacattaaatccataccaaccaatccacacgaatataccgccaatcaaagtaatgataagattatgtggtgttgattcagaatgtttatttccttttccaatcattatagctaatactaaaccagaaacacctgatgtaatatgaacaactgtacctccagcgaaatctaatacaccgagtttgttaatccaacctccgccccaaacccaatgtgctactggactgtatacaagagcagtccatattactacgaataataaataaggaataaacttcattttctcagcaattgaaccagataaaattgagattgcaatcgtacaaaacatcatttggaataacataaataatgccaatggaatatgcgggctaatatcttcttgtgtcgcgaaacctacatgattaagaaatgtatattcccagttaccaaaccataaactaccttccccaaaactaattgtaaaacctactgtaacccaaacaaatgtaaccagcacaatcgctgccatactttgcataacagtatttaatgcatttttagattgaactaaaccgccataaaataaacttaatccaggcgtcattagccaaactagcaatgtacataaaaacataaatattgtatcgttaagattcatacttaccactcccttgttttcataataatctgataatttacaaaaagcaaaattgcgtaaagttttattacatcttttggaataaaatgtatcacgctatataaaaaatgatttcatgaactaaaacaaaaaagactacttactcgcttttaaagtagcggaagtagccctagacgctaatatctattttattgttaaaatgatatcgttaaactttttgaattgtaattgtccatgaagcattatcaatttgttcatagtttgttacaggatatccattttctgcagcccaatttggaatagcttccgtcgcttgcgtgcaatcaaaatcaatttttaattcatctccagattgcaatgttgccattttcttttgcgcttcaattaacggaaatggacataccattcctactgtacctaattcgtgtatcataattatttctccttttccaatcacttttatttgatcaacatcattggcatattaatcttctatactatttgcgtttgctgttgggcctttgcagattgttgttttacttttttcattggacgaacaaagataaaatgactcattgtccataccccaactatcatcgatgctagcgcaatccatccttgccaagtcatcgttgccgtttcaaccaaaccgttaccgatagaacaaccaccagcaactgacgcaccaaatcccatacatatgccaccaatagcactgtttcgtattgtaatcttgtctggcaatcgccatttaaattctcttgatcctctagctgcaatatatgaaccaatgaaaattcctagaactaaaaagacaccccaatcaataaatttagtttcacctgtaatcaaaaagtgtactaaatttgctgatggtgttgttatacctaaaccgtcatttcttccagttgatacactcattggccaagctaagagtgcgataagtccaattgcaattgctgcaataaatggatggtatcgtttttcgaaaaggtaatatctaatacctgtataacgttgctttagttttggaaaagcaactcgaactttcttattattgagcgttcttacaactagaaaaatggtgattatagttaatataacgactaatccccaaaacggaatgcccgttgtttgggacatatcactatttacattcgttggttgattaattttatccattactggctttaaaatccctgttttagtgattgctgcagtaacagcatataatactaatgcaatccaactaccaattagcccttccccagcgcgataccaagtacctgttgcacaccctccagccaatactattccaattccaaaaataaaagaacctataactgttcccaatattggaaaactatgtgcaggaatttgtaaaatacttgttgccgtcaaaatcaataatcctatactttgaatagtaatagcgattaataatgcatagaacatcttattattcttttgcacatacatatctcgaaagccacctgttaaacaaaatcttgttctttgcatcacaaaacctaagagtcccccgacaattaagccactaaaaatcatccacataatcctaaccccctcatttccgataagtttagtatgtattataggtgatggttttctagttttcaaccttatacacaacatttttgatatttatattatgttcatataagaaatgcgattaattacgattcatctttatatctctacgtgataatttattaacctatacatatttatcaacacaacagtttttcctttcattttcaaacataacagaaaaagcctgagacatacttagtcccagactgttctataattaattaaagatataacaagggtaatcattcaaagctaacatcacatttattcactgtaatttttcataaagaataataatgactgtaattctatacctaagtcaatttgatgtacttgcacatctgaaggcgtattaattctaccaggagtgaagtttaaaatacctttcacaccagcttggacgagttcatctgtaactttctgtgcaactctttctggtgtagttagaatcacaacatctatttcttccttcttcaatgttgttactaattcatcgttatcttttacaataacgttccctattttctggccaataacatcttcttttacgtcaaacgcttctgtaatcgtcatatcgtcatgtattgaaaagttatatgtgagcaaagctttccctaggttcccaactccgacaattgcgattttgatcatgtcactctcgcttagttcagatttaaagaaatccaataaactatctatattatatccgtacccttttttacctaattcgccaaaatatgaaaagtcacgacgaattgttgccgagtcaatttgtaacgcatcgctaatcgcttttgaatttacacgatctatacctttagattttaatgaactgacaaatctataatataacggcaaacgttttaaagttgctcgaggaattttaacttggtcactcattcgctatttcctccttcgtgtttgaatgaattatatctatgtattcaaacgagttagagcgtaattgttagattattaaaaaacaaataattgattacaatgaatacctaaatattatacattattgaattttaaaaataaatatcttagtttcaagacggcgttttatactgtaaaatggttattaatgtaataattacgacttttatcataagttaataaaatttgagaaagacgaaaggtgaagatcgaatgatacttttacaactcaatcatatatcaaaatcgttcgatggtgaagatatatttactgatgttgattttgaagtaaaaactggtgaacgaattggtatcgtaggaagaaatggcgccggtaaatcaacattgatgaaaattatagctggcgtagaaaactatgattctggaaatgtgtcaaaaattaaaaacttaaaactaggttacttaactcaacaaatgactttaaattctaatgcaacagtttttgaagaaatgtcaaaaccatttgaacatattaaacgaatggaaagcttaatcaaagaagaaaccgattggttatcaaaacatgcaaatgattacgatagtgatacatataaaacacatatgtcccgttatgaatctttatcgaatcaatttgaacaattagaaggatatcaatatgaaagtaaaattaaaacagtacttcacgggttaaattttagtgaagaagatttcaataaacctatcaatgattttagcggtggccaaaaaacacgtttatctttagctcaaatgctattaaatgaacctgatttattacttttagatgaacctactaaccacttagatttagaaacgacaaagtggcttgaagattatctacgttattttaaaggtgcaatcgtcatcatcagccatgatcgttactttttagataaaatagttactcaaatttatgatgtggctttaggtgatgtcaaacgctatgttggtaattacgaggaatttatacagcaacgggatttatattatcaaaaacgaatgcaagaatatgaaagtcaacaagcagaaataaaacgattagaaacttttgttgagaaaaatattacccgtgcttcaacaagtggaatggcaaaaagtagacgtaagattttagaaaaaatggaacgcattgataaaccaatgttagatgccaaaagtgcaaatattcaatttggctttgaccggaatacaggtaatgacgtcatgcatgtaaaaaatttagaaatcggttatcaaactgcaattaccaaacctatcagtatagaggtctctaaaggcgatcatatagcaatcattgggccaaatggtattggaaaatcgaccttaattaaaactattgctaatcaacaaaaagcgcttaatggcgatattacttttggcgcaaatttacaaattggttattatgatcaaaagcaagcagaatttaaatctagtaaaacgattttagattatgtgtgggatcaatatccgttaatgaatgaaaaagatattcgttcagttcttggacgtttcttatttgtacaagacgatgttaaaaagataattaatgatttatctggtggtgaaaaagcacgtttacaactagcactacttatgttgcagcgtgacaatgtacttattttagatgaacctaccaaccacctcgatatagattcaaaagaaatgttagaacaagcactccaacattttgaaggaacaatactatttgtttcccatgatcgttactttattaaccaattagcaaacaaggtatttgatttaacaattgatggcggaaagatgtatttaggagattatcaatattacattgaaaaagttgaggaagcggaagcgttgaaagcgcaccaagaagaacagtcagttaacgtacaagcacatgaaaagtctatggaacaatcgtcgtatcataaccaaaaagaacaaagacgtgaacaacgtaaacttgaacgacaaatatccgagtgtgaaaatgaaatagaaactttagagactactatcttacaaattgacgagcaattaacccaaccagaagtttataacaatccacaaaaagcaaacgaattagctatccaaaaacaagatagcgaacaaaaattagaacacgctatgtctaaatgggaagaattacaacaaaaactataaaaatatacataactctaactgtaaaatccctatagttagagttatttttttacaaattttaaatttttttattcacaataaaaacgctgatattatagctatccacagagttatcctagttatccacaagtaaattaacactaatcaaccatttattttctattttcccacctgatatccacaataaatgacgttatcaacaccttttatccacaagttatgcactctttgttgataagtacgcatgttctctattgacattgtttttatcaaaattcattgttaagacattttctttatgaaataataataatattattgaagcatatttttattattattcaaaataaataaggagatagttatgagcacaaatcaaacatttttaatatttgttatagcaattattctacttacatctgtaataggaattgttggacgatacatgagtcgtcaacgtctattaaaatctatggaaacattatggcaaacgatttctccattagaggcttttatcagaccgaactcacatttcgactatgagtataagctctacaaggataaatttgaatcacattcattagttgatgataaaacttggtccgatttaaatatgaatgcaatttttcataagatgaattataatttaacagctattggcgaaatgaaactatatgcctgtttacgtggaatgctttcaattacgaacaaatcattacttagtttaattaatgataatgctgaatttagaaaaaacgtaacatatcatttagctttgataggtaaaactgtttatccaacatttccagaccaaatcacaccggtaaaacgtcaaaatatattgtttctatgcccgtttttaccagttatctcatttgtagttatatttattaattcacaagttggtattttattatttcttatgagttgcctatttaatatcattttatctgcaactttaaagcgtacatatgaggatgacttaaagtctatattttatgcatccaatgttttaaaaataggctatactatctcaaaaattagatatgctccacaacccgaagtcaattttaagcaatttagaacagcacgtcatttaacgagtgttttagctgaagttaatgatgaagatatcggagctatggtaattaaactagttaaacttattttcatgcttgattatgttttattccattcaattcaaaaaagctatacaacacatatgaatgagctaaaaaattgtttcgattacatagctgaattagataatcattatgcattagcaatgtatcgtagaacgctagaatgctatactgaaccacaaattgatgattcaaatgatggtatagtattctctgatttaacacatccactcatagcagatgcagtagccaatgatttctcactatcacaaaatatactgttaactgggtctaatgcttcaggtaaatcaacatttatgaaatccatagcaataaacatcattcttgcatcggctatacaaacagttaccgcaagcaaatttgtatatcaacctggaattgtgttcacgtcaatggcaaatgccgatgatgtgttatcaggcgatagttattttatggctgaattaaaatctattaagcgtattgttgaaatttcagataatcaaaaaatatactgctttatagatgaaatttttaaaggtaccaacacaactgaacgaattgccgcttcagaatcagtactatcatttttacatgaaaaatctaactttagagttattgcagcaacacatgatattgagttagctgaactcttaaaacaacgttatgaaaattatcatttcaatgaggtaatagaaaataataacatacattttgattacaaaattaagcctggcaaagcaaatacacgtaatgccatcgaattattaaaaatcacttcatttccagcaaaaatatatgaacgagcaaaagataatgtttccaatggttagcatgaatcttgaacatcaatcaatgttcaagtcgcaacattgttatattgacagtctttgactaaatgaaaatgcgcttgtaataagttttttcaatactggtcaggggccccaacacagaaggtgacgaaaagtcagcatacaataatgtgcaagttggcggggccccaacataataaatcattagtggttctttatcttttctgtctcactcccctaattgcaatataaaaacgtcagctatcacatgatagaagactatgaacagttttaataatgttcatcgtaatcatgttaataactgacgtttattttattctgcagaatactcttctaaatctatattgctgtgcccatttaatgctaaatcagcaaatcgaccttgctgatacaaatagtggccggcaacgcctatcattgcagcattatctgtgcataatttaggacttgggatagttaattgaatgtcattgactttgcattgatccgctaaagattgacgtaatcctttattactcgccacgccaccagcaacaattaatcgctgaacaccatattctttacaagcttgaatagctttaaacgtgagcacttctacaacactattttgaaagctcgttgctacgttagcttcaatgattggaatatttttttgtcgttgattgtgaagttgattgattacggcacttttcaacccactaaaactaaaatcataactatctttatccaaccaaacacgagggaatgaataagtatcttcaccttcagcagccaaccggtcaacttgtggaccacctggataatttaaaccaattgttcttgccactttatcataagcctcacctactgcgtcatctcgtgtttcaccaatgacttcaaatgttaagtgatctttcatataaactaattcagtatgtccacctgaaacaataagtgcaattagcgggaatgttaatggctcttctatgtgattagcatatatatgtcctgcaatatgatgaacaggaataagtggcttatcgtaagcaaatgccaatgctttggctgcattaacacctattagtaacgcaccaattaatccagggccttctgtaaccgctatggcatcaatatcttccattgatacatcgtcatccactagagcctcgtttattgttgttgttataccttcaacgtgatgtctacttgccacttcgggaacgacaccgccaaatcgtttatgactttcaatctgacttaaaactgtatttgataaaatatctctgccattttttataacactaacgcttgtttcatcacaacttgtttcaacagctagtattaatatatctttagtcatttaaattcacccacataaccattgcgtcctcaccttcaccataataatttttacgtttaccaccatattgaaatcctaaattttcatatacatgttgtgccactttattattaactcttacttctaaactcatcacatcacaagtgtgacttgcatagtttattccgtattttaaaagcatttgacctaaaccatatcccctataattatcatcgattgcaactgtcgtaatttgagcttgatcgataacaatccataaacctaaataaccaataatttgttgttcaaattctaagacaaaatatttcgcaaagttattttgctctatttcatgataaaatgcgtcaattgtccaagaactatcattgaaactccgacgctcaatatcaaagacttgtggcacatcttctttggtcatcgctctaatatttaattgttcttttgactgttgatccaatttcgttccgcctcagctaatttatggtatttaggagtaaatgtatgtacgtctgaaggtttatctatcaattgatacatgactgatgcatttggtagctgcgcaatcacatcaccttgcaattcatattgtaattttacagtatctttcccaatataaataaatggttggtttaaatcttctaaaaaagctcgcaatgcttctatcgacatatattgatcttctaaaatagtcactaattgaccattttgccactggaatatgcctgcataaactgcttgtcttcttgcatcaaacacaggaaccaataatttatcagtatgatcgattgttgctgccaatgcctttaatgatgaaacaccatataatttaacatctaacgcatacgctaatgttttagcaacagtaacaccgatacgtaagccagtatatgaaccaggaccttcagcaacaataatcgcatctaattgctgtttagctattttgctctgctcaaatagctgactaatcgcaggcattaattgcactgaatgattttgtttagaatctgtagttatttcagctaaaacttcatcgttttgcatcaatgctactgataatggttgattcgatgtatcaatgagcagcgaattcatggataattgcctccttaatttgttcataatgttctccttgcgcgaacaagtcaatttgtcttgaattttcagatattgttgaaatgttaatagataaatgcgtcgctggaagtaaatcttttataaattgactccattcaataacagtaattgcctgatcttcgaaaaattcatcaaaccctaaatcttcatcagaatcttctaagcgataacaatccatatgatgcaattttaaattttttcccctatatgatttgatgatgttaaatgtcggggaattaatcgtacgtcttacaccaagagcttttcctataaattgcgttaacgttgttttacctgctcctaaatctccgttaagtaaaatcaaatcaccacttttcaattgctcgactaaaaacatagcaaattgattcatttcatctaaattatttatctttatcaatgttgattctcctatattatgcttttcattcataaaaatgattatccattgttcaatcgtatctaactttatatttaacctttatattgtaacaaatttcaacttaaatttcttatctttgaaacagattatctcttcaaagttaattgtaagaaaatttaaaatatttgttgacatactaaagcagatatagtaaattaaatttatcaaatttttagacaattctaactattaaagtgatatataccattcacggaaggagtataataaaatgcttaatcaatatactgaacatcaaccgacaacttcaaatattattattttattatactctttaggactcgaacgttagtaaatatttactaaacgctttaagtcctatttctgtttgaatgggacttgtaaacgtcccaataatattgggacgtttttttatgttttatctttcaattacttatttttattactataaaacatgattaatcattaaaatttacgggggaatttactatgcgaagcgacatgatcaaaaaaggagatcaccaagcaccagcaagaagtcttttacatgccacgggcgcgctaaaaagttcaactgatatgaacaaaccatttgtagctatttgtaactcttatattgatattgttcctggacatgttcacttgagagagcttgcagatatagctaaagaagcaattagagaagccggtgccattccatttgaattcaatacaattggtgttgatgatggaatagctatgggacatatcggaatgcgatattctctaccatcacgtgaaattattgcagatgcagctgaaactgtaattaacgctcattggtttgacggcgtattttacattcctaattgtgacaagattacacctggtatgattttagcagccatgtggacaaacgtaccagctatcttttgctctggtggaccaatgaaagctggcttatctgcacatggaaaagcattaacactttcatcaatgtttgaagcagtcggcgcatttaaagaaggatcgatttctaaagaagaatttttagatatggaacaaaatgcctgccctacttgtggttcatgtgctgggatgtttactgcaaattcaatgaactgtttgatggaagttttaggtctagcattaccatacaacggtactgcacttgcagtcagtgatcagcgacgcgaaatgattcgtcaagcagcttttaaattagttgaaaatattaaaaatgatttaaaaccacgtgatatcgttactcgcgaagcaattgatgatgcatttgcacttgatatggctatgggtggttcaacaaacacagtactgcatacgttagccattgccaatgaagctggtattgattatgacttagagcgcattaatgctattgccaaacgcacgccatatttatcaaaaatagcacctagttcatcgtattcaatgcatgatgtgcatgaagctggtggcgtcccagcaattattaatgaattgatgaagaaagatggcacgttacacccagatagaatcacagttactggcaaaacgttacgtgaaaataacgaaggcaaagaaattaagaactttgatgtcattcaccctcttgatgcaccatatgatgcacaaggcggtttatctatcttatttggtaatatcgcccctaaaggcgcagttattaaagttggcggcgttgatccatctatcaaaacatttactgggaaagcaatttgtttcaattcgcatgatgaagctgttgaagcaatagacaatcgtaccgttcgtgcaggccacgtcgttgtcattagatatgaaggacctaaaggtggaccaggtatgcctgaaatgttagcacctacttcctctattgttggtcgcggcttaggtaaagatgttgcattaataactgatggtcgtttttccggtgccacaagaggtattgcagttggtcatatttcccctgaagctgcatctggtggaccaattgccttaattgaagatggagatgagattactattgatttaacaaatcgtacattaaacgtaaaccagcctgaagatgttctagcgcgtcgccgagaatctttaacaccatttaaagcgaaagtaaaaacaggttatctagctcgttatactgccctagtaactagcgcaaatacaggtggcgtcatgcaagtgcctgagaatttaatttaatttattttatttttatattggagatggttaaaatgtctaaaactcaacatgaagtaaaccaaaatattgaccctttaaaaatggctgaatcacttgaacctgaacaactaaatgaaaaaactttaaatgacatgcgttcaggatcagaagtgctagtagaagctctacttaaagaaaatgtggattatttattcggttatcctggtggtgccgtactacctttatacgacacattttatgatggtaaaatcaaacatattttagcaagacacgaacaaggtgctgttcatgctgcagaaggttatgcacgtgtatctggtaaaactggcgtcgttgtagttacaagcggtccaggtgcaacaaatgtaatgacaggtattacggatgcacattgcgactctttacctctagttgtattcactggacaagttgctacaccaggcattggtaaagatgcattccaagaagcggatattctatctatgacatcgccaattacaaaacaaaattatcaagtgaaacgtgttgaagatatacctaaaatcgtacacgaagctttccatgtagctaattctggacgcaaaggtcctgtagtgattgattttccaaaagatatgggtgttttagctacaaatgtggatttatgcgacgaaatcaatattccaggttatgaagttgttacagaaccagaaaataaagacattgacactttcatctcacttttaaaagaagcgaaaaaacctgtcgtattagccggcgcaggtattaatcaatcaaaatcaaatcaattattgacacagtttgttaataaacatcaaatcccaacagttactactttactaggtctaggtgctgtaccttatgaggatacactatttttaggtatgggaggtatgcatggttcttatgctagtaacatggcattaactgagtgtgatttactcattaatttaggtagccgcttcgatgatagattagcaagcaaacctgatgcctttgcacctaacgccaaaattgtacatgtagatattgatccttcagaaattaataaagttattcatgtagatttaggtattattgcagactgtaaaagatttttagaatgtttaaatgataaaaatgttgagactatagaacacagtgactgggttaaacattgtcaaaataataagcagaaacacccatttaaacttggtgaagaagatcaagtattttgtaagccacaacaaacaatcgaatatatcggcaaaattacaaatggtgaagcaattgttactacagacgtgggacaacatcaaatgtgggcagctcaattttatccatttaaaaatcacggacaatgggttacaagcggtggtttaggaacaatgggattcggtattccttcgtcaattggtgccaaattagctaatcctgataaaacagtcgtatgtttcgtcggtgacggtggtttccaaatgacaaaccaagaaatggcactattacccgaatatggtttagatgtcaaaatcgtactaatcaataatggaacattaggtatggttaaacaatggcaagataagttctttaatcaacgcttctcacactcagtatttaatggtcaacctgattttatgaaaatggcagaagcatatggcgtcaaaggtttcttaatcgataagccagaacaactggaagaacaattagatgcagcgtttgcttatcaagggccagctttaattgaggttcgtatttcccctactgaagctgtaaacccaatggttccgagtggcaaatcaaatcatgaaatggagggcttataatgacaagaattcttaaattacaagttgcggatcaagtcagcacgctaaatcgaattacaagtgcttttgttcgcctacaatataatatcgatacattacatgttacacactctgaacaacctgggatttctaacatggaaattcaagtcgatattcaagatgatacatcacttcatattttaattaaaaaattaaaacaacaaattaatgttttaacggttgaatgctacgaccttgttgataacgaagcttaattttaagacaaaggcaatgatgcgctaattagttatagatatatcataggctgctagttaacatctgccactattacaaagttatatttcagaattttcgaaaaacaaaacatttaattatttggaggaatttattatgacaacagtttattatgatcaagatgtaaaaacggacgctttacaaggcaaaaaaattgcagtagtaggttatggatcacaaggccacgcgcatgcacaaaacttaaaagacaatggatatgatgttgtcatcggtattcgaccaggtcgttcttttgacaaagctaaagaagatggatttgatgtgttccctgttgcagaagcagttaagcaagctgatgtaattatggtgctattacctgatgaaattcaaggtgatgtatacaaaaacgaaattgaaccaaatttagaaaaacataatgcgcttgcatttgctcatggctttaacattcattttggtgttattcaaccaccagctgatgttgatgtatttttagtagctcctaaaggaccgggtcatttagttagacgtacatttgttgaaggttctgctgtaccatcactatttggtattcaacaagacgcttcaggtcaagcacgtaatattgctttaagttatgcaaaaggtattggtgcaactcgtgcaggtgttattgaaacaacatttaaagaagaaactgagacagatttatttggtgaacaagcagtactttgcggtggtgtatcgaaattaattcaaagtggattcgaaacactagtagaagcgggttatcaaccagaattagcttattttgaagtattacatgaaatgaaattgatcgttgatttgatgtatgaaggcggtatggaaaatgtacgttactcaatttcaaatactgctgaatttggtgactatgtttcaggaccacgtgttatcacaccagatgttaaagaaaatatgaaagctgtattaactgatatccaaaatggtaacttcagtaatcgctttatcgaagacaataaaaatggattcaaagaattttataaattacgcgaagaacaacatggtcatcaaattgaaaaagttggtcgtgaattacgcgaaatgatgccttttataaaatctaaaagcattgaaaaataagatagacctacaatgaggagttgttaaatatgagtagtcatattcaaatttttgatacgacactaagagacggtgaacaaacaccaggagtgaattttacttttgatgaacgcttgcgtattgcattgcaattagaaaaatggggtgtagatgttattgaagctggatttcctgcttcaagtacaggtagctttaaatctgttcaagcaattgcacaaacattaacaacaacggctgtatgtggtttagctagatgtaaaaaatctgacatcgatgctgtatatgaagcaacaaaagatgcagcaaagccggtcgtgcatgtttttatagcaacatcacctattcatcttgaacataaacttaaaatgtctcaagaagacgttttagcatctattaaagaacatgtcacatacgcgaaacaattatttgacgttgttcaattttcacctgaagatgcaacgcgtactgaattaccattcttagtgaaatgtgtacaaactgccgttgacgctggagctacagttattaatattcctgatacagtcggctacagttaccatgatgaatatgcacatattttcaaaaccttaacagaatctgtaacatcttcaaatgaaattatttatagtgctcattgccatgacgatttaggaatggctgtttcaaatagtttagctgcaattgaaggcggtgcgagacgaattgaaggcactgtaaatggtattggtgaacgagcaggtaatgcagcacttgaagaagtcgcgcttgcactatacgttcgaaatgatcattatggtgctcaaactgcccttaatctcgaagaaactaaaaaaacatcggatttaatttcaagatatgcaggtattcgagtgcctagaaataaagcaattgttggccaaaatgcatttagtcatgaatcaggtattcaccaagatggcgtattaaaacatcgtgaaacatatgaaattatgacacctcaacttgttggtgtaagcacgactgaacttccattaggaaaattatctggtaaacacgccttctcagagaagttaaaagcattaggttatgacattgataaagaagcacaaatagatttatttaaacaattcaaggccattgcggacaaaaagaaatctgtttcagatagagatattcatgcgattattcaaggttctgagcatgagcatcaagcactttataaattggaaacactacaactacaatatgtctctagcggccttcaaagtgctgttgttgttgttaaagataaagagggccatatttaccaggattcaagtattggtactggttcaatcgtagcaatttacaatgcagttgatcgtattttccaaaaagaaacagaattaattgattatcgtattaattctgtcactgaaggtactgatgcccaagcagaagtacatgtaaatttattgattgaaggtaagactgtcaatggctttggtattgatcatgatattttacaagcctcatgtaaggtatacgtagaagcacatgctaaatttgcagctgaaaatgttgaaaaggtaggtaattaattatgacttataacattgttgccctacctggtgatggaatcggtccagaaattttgaacggatctctatccttgcttgaaattataagtaataaatataactttaattatcaaatagagcaccacgaatttggtggtgcctctattgatacattcggcgagcctttaactgagaaaaccttaaatgcgtgtaaaagagcagatgctattttactgggtgcaatcggtggacctaaatggacagatcctaacaatcgaccagaacaaggattattaaaattacgtaaatcattaaatttatttgcaaatatacgccccactaccgttgtcaaaggcgctagttctttatcacctttaaaggaagaatgcgttgaaggcacagatttagttatagtccgtgaattgacaagtggtatttattttggagaacctagacattttaataatcacgaggccttagattctcttacttatacaagagaagaaatagaacgcattgttcacgtagcatttaaattggctgcttcaagacgaggaaaactaacatctgttgataaagaaaacgttttagcttctagtaaattgtggcgaaaagtcgtaaatgaagtgagtcaattatatccagaagtaacagtaaatcacttacttgttgatgcttgtagtatgcatttaatcacaaacccgaaacaatttgacgtcatcgtatgcgaaaacttatttggcgatattttaagtgatgaagcttcagtaattcctggttcacttggactatcaccttctgctagttttagtaacgatggtccaagattgtatgagcctattcatggatcagcaccagatattgcaggtaaaaacgttgccaatccatttggaatgattctatctttagcgatgtgtttacgtgaaagcttaaatcaaccagatgctgcagatgaattagaacaacatatttataacatgatagaacatgggcaaacgacagcagatttaggcggcaaactgaatactactgatattttcgaaattctatctcaaaaattgaatcactaagggggagatgtaaatgggtcaaacattatttgacaaggtatggaacagacatgtgttatacgggaaattgggcgaaccgcaactattatacattgatttacaccttatacatgaagttacttctcctcaagcatttgaaggacttaggcttcaaaacagaaaattaagacgcccaaatttaacatttgcaacactcgatcacaatgttcctactattgatattttcaatattaaagatgaaattgcaaacaaacaaatcacaacattacaaaaaaacgccatagattttggggtgcatatttttgatatgggctctgatgaacaaggtattgttcacatggtaggacctgagacaggacttacacagcccggcaaaacaatcgtttgtggtgactctcacacagcaacacatggagcatttggtgctattgcatttggaattggaacaagtgaagttgaacatgttttcgcaactcaaacgctatggcaaacaaaacccaaaaacttaaaaatcgatattaatggtaccttaccaacaggcgtctatgctaaggacattattctgcatttaattaaaacgtatggtgttgattttggtacaggctatgctttggaatttactggcgaaacaattaaaaacctttcaatggacggtcgaatgactatttgtaacatggctatcgaaggtggtgccaaatacggcataatccaacctgatgatataacatttgaatatgttaaagggagaccatttgccgataacttcgctaaatcagttgataagtggcgtgagctatattctgatgacgacgcgatatttgatcgtgtaattgaacttgatgtttcaacattagaaccacaagtgacatggggaactaatcctgaaatgggtgttaatttcagtgaaccattccctgaaatcagtgatatcaacgatcaacgtgcgtatgattatatgggattagaaccaggacaaaaagctgaagatatcgacttaggatatgttttcctaggttcatgtacaaatgctagactttcagatttgattgaagctagtcatattgttaaaggaaataaagttcacccaaatattacagctattgtcgtaccaggttctcgtacagtaaaaaaagaagctgaaaaattaggtctagatactatctttaaaaatgcaggttttgaatggcgtgagccaggatgttcaatgtgtttaggtatgaatcctgaccaagtaccagatggtgtacattgtgcttctacaagtaatcgaaactttgaaggacgacaaggtaaaggtgcaagaacacatttagtatcccctgctatggcagcagctgcagctatacacggtaaatttgtggatgtgagaaaggtggttgtttaaatggcagcaatcaaacctattacaacatataaaggtaaaatcgtcccacttttcaatgacaatattgatacagaccaaattattcctaaagttcatttaaaacgtatttcaaaaagcggatttggtccattcgcttttgatgaatggcggtacttacctgatggttcagataatcctgatttcaatccaaataagcctcaatataaaggtgcatccatattaattactggtgataattttggatgtggttcaagtcgcgaacatgctgcttgggcacttaaggactacggattccacattatcatcgcaggaagtttcagtgacattttttatatgaattgtaccaaaaatgcgatgttacccattgttttagaaaaaagtgcacgtgaacatcttgctcaatatgtagaaattgaggtcgatttaccaaatcaaactgtgtcatcaccagataaaagttttcattttgatatcgatgaaacatggaaaaataaacttgtaaatggcttagatgacattgcaatcaccctacaatatgaatcattaatagaaaaatatgaaaaatcactttaagggagttgaatattatgacagtcaaaactactgtttctacacaagatattgatgaagcatttttaaggcttaaagatattgtcaaagaaacacctttacaattagaccattacttatctcaaaagtatgattgtaaagtttatttaaaacgagaagatttacagtgggtacgttcttttaaattaagaggtgcttacaacgctatttctgttttatcagatgaagctaaaagtaaaggtattacatgtgcgagtgcaggtaatcatgctcaaggtgttgcctatacagctaaaaaacttaatttaaacgctgttatctttatgccagtcactacacctttacaaaaggtaaatcaagtaaagttctttggaaatagtaacgttgaagttgtactcactggtgatacatttgatcactgtttagctgaagctttaacttatacaagtgaacatcaaatgaactttatagatccattcaataatgttcatacaatttctggacaaggtacgcttgctaaagaaatgctagaacaagcaaagtctgacaatgttaactttgattatctatttgccgcaattggtggtggtggtttaatttcaggtattagtacctattttaaatcctattctcccaacacaaaaattatcggagttgaaccttcaggtgctagtagtatgtatgaatctgttgtcgtaaataatcaggttatcacattacctaatatcgataaatttgtcgatggagcttctgtagccagagttggcgatattacttttgaaattgccaaaaaaaatgtagataactacgtacaagtagatgaaggtgctgtatgttcaacaattttggatatgtattcaaaacaagcaatagtagcagaacccgctggcgctttaagtgtaagtgcgcttgaaaactataaagatcatattaaaggtaaaacagtggtttgtgtcattagtggtggtaataatgatattaatcgaatgaaagaaattgaagaacgttcattactatacgaagaaatgaagcattactttatcttaaatttccctcaacgtccaggtgcattgagagaatttgtaaatgacgtattaggacctcaagacgacattactaaatttgaatacttaaaaaaatcttctcaaaatacaggtactgtcattattggtattcaacttaaagatcataatgatttaatacaactcaaacaacgtgtaaatcatttcgatccttccaatatttatattaatgaaaataagatgttatattcattgttaatttaacacgtagtaagaaaagcagtcataaattgatttctaattgaaatcatcttatgactgctttttattatgctttacattattgaggttgcacgctttgtataccatcgtatatttctttgagcctaaagtcttcttcattccccaccccattatttatattttgaatggcagttgaaattactttgtcataaatagccttctcactttctggtaaattatgtcgtggtatactcatcaaagcatatgctttttgtttatcttcaatattttctatacgcttcttcttattattaaaattctcattagcttcactaccattattattaatattatgcgtgttttctttttcatgtttgttttcttgcatatgattcgggatttctgacttattttcagcatctgtaggaaaatatattttataagcaaaaaatccacacacaatcaatgagcatacaaataaaaaagttaacatcgtaccaataaatattttcaaatccgttctcctttcaaccattcattcttacatgtatatttagtattaaaaaatccttatagtctcaacttgcctggcaacgttctactctagtggaacgtaagttggctaccttcgtcgctaagaacctttcttgtcttgtgacaatcgcttgcttctttcctcttcttcggctctcacttactcatttagctctactaaactcgttgcgctcttttctcgtttcgtcagattcaaacgttttcacttcgccaagccatttttctttgtgttaatttttactttgacattttagacgtaaaaaaagagaccttgcggtctcaacttgcctggcaacgttctactctagcggaacgtaagttcgactaccatcgacgctaaggagcttaacttctgtgttcggcatgggaacaggtgtgacctccttgctatagtcaccagacatatgaatgtagattatacattcaaaactagatagtaagtaaaagtgattttgcttcgcaaaacatttaaatttgattaagtcttcgatcgattagtattcgtcagctccacatgtcaccatgcttccacctcgaacctattaacctcatcatctttgagggatcttataaccgaagttgggaaatctcatcttgaggggggcttcatgcttagatgctttcagcacttatcccgtccacacatagctacccagctatgccgttggcacgacaactggtacaccagaggtatgtccatcccggtcctctcgtactaaggacagctcctctcaaatttcctacgcccacgacggatagggaccgaactgtctcacgacgttctgaacccagctcgcgtaccgctttaatgggcgaacagcccaacccttgggaccgactacagccccaggatgcgatgagccgacatcgaggtgccaaacctccccgtcgatgtgaactcttgggggagataagcctgttatccccggggtagcttttatccgttgagcgatggcccttccatgcggaaccaccggatcactaagtccgtctttcgaccctgctcgacttgtaggtctcgcagtcaagctcccttatgcctttacactctatgaatgatttccaaccattctgagggaacctttgagcgcctccgttaccttttaggaggcgaccgccccagtcaaactgcccgcctgacactgtctcccaccacgataagtggtgcgggttagaaagccaacacagctagggtagtatcccaccagcgcctccacgtaagctagcgctcacgtttcaaaggctcctacctatcctgtacaagctgtgccgaatttcaatatcaggctacagtaaagctccacggggtctttccgtcctgtcgcgggtaacctgcatcttcacaggtactatgatttcaccgagtctctcgttgagacagtgcccaaatcgttacgcctttcgtgcgggtcggaacttacccgacaaggaatttcgctaccttaggaccgttatagttacggccgccgtttactggggcttcgattcgtagcttcgcagaagctaaccactcctcttaaccttccagcaccgggcaggcgtcagcccctatacatcaccttacggtttagcagagacctgtgtttttgataaacagtcgcttgggcctattcactgcggctcttctgggcgttaaccctaaagagcaccccttctcccgaagttacggggtcattttgccgagttccttaacgagagttcgctcgctcaccttagaattctcatcttgactacctgtgtcggtttgcggtacgggcacctattttctatctagaggcttttctcggcagtgtgaaatcaacgactcgaagacacaatgtcttctccccatcacagctcagccttaacgagtaccggatttgcctaatactcagccttactgcttagacgtgcaatccaatcgcacgcttcgcctatcctactgcgtccccccatcgattaaaacgattataggtggtacaggaatatcaacctgttatccatcgcctacgcctgtcggcctcagcttaggacccgactaacccagagcggacgagccttcctctggaaaccttagtcaatcggtggacgggattctcacccgtctttcgctactcacaccggcattctcacttctaagcgctccacatgtccttacgatcatgcttcaacgcccttagaacgctctcctaccattgtccaaaggacaatccacagcttcggtaatatgtttagccccggtacattttcggcgcagtgtcactcgactagtgagctattacgcactctttaaatgatggctgcttctaagccaacatcctagttgtctgggcaacgccacatccttttccacttaacatatattttgggaccttagctggtggtctgggctgtttccctttcgaacacggaccttatcacccatgttctgactcccaagttaaattaattggcattcggagtttgtctgaattcggtaacccgagaggggcccctcgtccaaacagtgctctacctccaataatcatcacttgaggctagccctaaagctatttcggagagaaccagctatctccaggttcgattggaatttctccgctaccctcagttcatccgctcacttttcaacgtaagtcggttcggtcctccattcagtgttacctgaacttcaacctgaccaagggtagatcacctggtttcgggtctacgaccaaatactaaacgccctattcagactcgctttcgctacggctccacatttactgcttaaccttgcatcaaatcgtaactcgccggttcattctacaaaaggcacgccatcacccattaacgggctctgactacttgtaagcacacggtttcaggttctatttcactccccttccggggtgcttttcacctttccctcacggtactggttcactatcggtcactagagagtatttagccttaggagatggtcctcccagattccgacggaatttcacgtgctccgtcgtactcaggatccactcaagagagacaacattttcgactacaggattattaccttctttgattcatctttccagatgattcgtctaatgtcgtcctttgtaactccgtatagagtgtcctacaaccccaacaagcaagcttgttggtttgggctcttcccgtttcgctcgccgctactaagggaatcgaattttctttctcttcctccgggtactaagatgtttcagttctccgggtgtgccttctgatatgctatgtattcacatatcgataacatgacataactcatgctgggtttccccattcggaaatctctggatcaaagcttacttacagctccccaaagcatatcgtcgttagtaacgtccttcatcggcttctagtgccaaggcatccaccgtgcgcccttaataacttaatctatgtttccaccatttttataagtcaaacgttaacatgaagttacgttcttttataaaaagatttaaacgcgttattaatcttgtgagtgttctttcgaacactagcgattatttcttatgaattcaagcttatttaaaactctttattcactcggttttgcttggtaaaatctatattttacttacttatctagttttcaatgtacaattaatggtgggcctaagtggactcgaaccaccgacctcacgcttatcaggcgtgcgctctaaccagctgagctataggcccatttttttgaatgttaaataaacattcaaaactgaatacaatatgtcacgttattccgcatcttctgaagaagatgttccgaatatatccttagaaaggaggtgatccagccgcaccttccgatacggctaccttgttacgacttcaccccaatcatttgtcccaccttcgacggctagctcctaaaaggttactccaccggcttcgggtgttacaaactctcgtggtgtgacgggcggtgtgtacaagacccgggaacgtattcaccgtagcatgctgatctacgattactagcgattccagcttcatgtagtcgagttgcagactacaatccgaactgagaacaactttatgggatttgcttgacctcgcggtttcgctgccctttgtattgtccattgtagcacgtgtgtagcccaaatcataaggggcatgatgatttgacgtcatccccaccttcctccggtttgtcaccggcagtcaacttagagtgcccaacttaatgatggcaactaagcttaagggttgcgctcgttgcgggacttaacccaacatctcacgacacgagctgacgacaaccatgcaccacctgtcactttgtcccccgaaggggaaggctctatctctagagttgtcaaaggatgtcaagatttggtaaggttcttcgcgttgcttcgaattaaaccacatgctccaccgcttgtgcgggtccccgtcaattcctttgagtttcaaccttgcggtcgtactccccaggcggagtgcttaatgcgttagctgcagcactaaggggcggaaaccccctaacacttagcactcatcgtttacggcgtggactaccagggtatctaatcctgtttgatccccacgctttcgcacatcagcgtcagttacagaccagaaagtcgccttcgccactggtgttcctccatatctctgcgcatttcaccgctacacatggaattccactttcctcttctgcactcaagttttccagtttccaatgaccctccacggttgagccgtgggctttcacatcagacttaaaaaaccgcctacgcgcgctttacgcccaataattccggataacgcttgccacctacgtattaccgcggctgctggcacgtagttagccgtggctttctgattaggtaccgtcaagatgtgcacagttacttacacatatgttcttccctaataacagagttttacgatccgaagaccttcatcactcacgcggcgttgctccgtcaggctttcgcccattgcggaagattccctactgctgcctcccgtaggagtctggaccgtgtctcagttccagtgtggccgatcaccctctcaggtcggctatgcatcgttgccttggtaagccgttaccttaccaactagctaatgcagcgcggatccatctataagtgacagcaagaccgtctttcacttttgaaccatgcggttcaaaatattatccggtattagctccggtttcccgaagttatcccagtcttataggtaggttatccacgtgttactcacccgtccgccgctaacatcagagaagcaagcttctcgtccgttcgctcgacttgcatgtattaggcacgccgccagcgttcatcctgagccaggatcaaactctccataaaaattatgatgtttgattagctcataaatactaaataatgtttgtaacttatagttacgttttttggaattaacgttgacatattgtcattcagttttcaatgttcattaaaattatttatggagcgggtgatgggaatcgaacccacaacatcagcttggaaggctgaggttttgccattaaactacacccgcttatttaattaagaattttgatgcggccgagaggacttgaacctccacgggatttctcccactaggccctcaacctagcgcgtctgccattccgccacgaccgcggatataggcatttaaaacatcttcgtttttcagaacgttattcattatattatgattaaaaatatttgtcaataacttttaatcgtttttttacattaaattaatttgtgttatcagttgttaacacaacgttatttataataaagcattaagaacttattgtcaacatattttataaatttaatttagaattgactgtctttcaaatcaaagtttatttaatttgttcttttttaaggaacgtgtttaatcatactaactataagctgtacagtcaatagataaattcaatcaaaatgtcattaaaaatgtataattatcttttgtgctactttaaagctttaattgggtaaagtttatatattattcattactaaaatacgccaagatttttaatctaatcaatttcattctatcctatcaagtcacaatttatgcctttacctatatcaaaagtagaaaagccgcgattgcgaagtattaaattacgacaatctcggctttaaacattttataaacacaatttcttcttattcaattactatgtttaccaatcaaaataattcattgataaattctatataaattccatacacctcataaataatcttaaatatactcgaattagctctatttgtattgtacttatttcaattgtcttttcattcttaattttccattgcaatgtccgcaacgcatacgattcgtatcaactttacggatacgtatatattttgcatgacatttagtgcaataatattcataatttgcccgttgttgatagctttcaatgctgttacaaaatctaggcgctccaacctgttggctcaatcgtttaaagtcttgatctttatgttgataacctttaccagaaatatgcagatgataatgacacaattcatgcagtataatttttacaacagcatcttctccataatgctcatattgttttggattaatttcaatatcatgggactttaaaagataacgtccgcctgttgtacgtaaccttttattgaaatatgcacaatgtcgaaacttacgtccaaatttttcttcagaaagcttttcaaccattttttgcaatatttcattattcatgtggatcaatcattgttaaagatactttgtctttatttttatcgatactataaatccaaacgtcaacaatatcaccaacactcactatatccattggatttttcacaaatttcttagacagcttcgatacatgcacaagaccatcttgcttaacacctatatcaacaaacgctccaaaatctactacatttcgaactgtcccacttaatttcataccttcttttaaatcttcaattgatagcacatcggatttaaggattggtgtttcaaactcgtccctaggatctcgattaggtgctttcaaggatttaataatatcctctaatgtaggtacaccgacttgtaattcaatcgccagttcatccatatccaatgaatttaatttagcttttaatgcatcactacctaaatcattgccaccaaatccgagtttatctaataactgatacgttactttatagctttcgggatgaatcgatgtattatccagtggctctgacccatctactattcttaaaaatcctatactctgctcaaaagttttagcacccaaacgcttaatcttgcttaactctttattatgctttattgcgccattttcttctctatatgcaattatatttttagcaatttgcgaacttagaccagacacatattgtaataatgatgatgatgctgtattgacatcaacacctacttggttaactgctgtttcaacaacgaaagttaatgcattttctagtgctttttgattaacatcatgctggtattgtccgacaccaatagatttaggatcgattttaactaattcacttaatggatcttgaacgcgtcgtccaattgatacggcacttctttcttccacttgaaaatcaggaaattcatctctagcaatttctgatgctgagtatactgaagcgcccgcttcattgacaatgatgaattgtactggcaactgatgctttttaattaaatctgcaacaaattgttctgtttcacgacttgcagtaccattgccaattgcaattaattgcacatcatacgctttaaccatttgtacaaaatccttctctgctgcctcttttttagaaactggtggatgcggataaatcacaccttttgctataaaagtaccgaatgggttaatgactgctaatttacaacctgttctaaatgctggatctacgcctaatatttgtttacctttcattggaggttgcagtaatagatttcttaagttttcactaaaaacatctattgcatgattttcagctttttcagttaaatcaacatgaatttcacgctctatcgaagggacaattaagcgtttcaagctatctttaatcgcctctaaaatataactgcgatttacattattatgattgatttcttgacgtgcaatgaaatcctctactgatgccgtatcgaattcaaactttacagataatactttctctttttcaccacgattcacagctaaaactctatgattagcaatgcgtttaattggctcactgtatgcatagtacatttcaaaaatacctttttcatcttcagcatttttctttttagatgtagttaacacaccttgatgatacatatcttttaaaatttttgttctatatttagggttatctgaaatttgttccgcaataatatcttgcgcacctttgatagcatcttcaaccgattgcacttcttcatttataaattgttgtgctttttcttcaattgagacttcatgtttacgtgccttcatccatatcgctaatggttctaatcctttacgtttcgcctcagttgcccttgtctttttcttttgtttgaaaggtctatataggtcttcaacacgttgtaatttgttctgttttaaaatatctttctttaattcctcagtaagtaatccttgctgttctatatttttgataacttcttctttacgtttttgtaaattgaccatatattggtattcgtcatcaatttgctttatttgaacttcatctagtccaccagtttgctcttttcgatacctcgcaataaatggtactgtatttttttcttcaagcagtgttaacactgcttcaatttgttttttactaaattgatatttctctatgattgaattaatcaattgattgtccatttacttaacccacactttttcttaaatttactcatttattttaacatattctaaaatacttctattaaggtatgatacttaatgcaattttcacttccaaaacattatatacacatgattaggtcatactatattttaaatcgcacgtagattattgaaaatgacgcaccatcattcgcaaaatttcataatctaagcctacttttttattctaatagcaatccacctatttaagccgacaattagatatcttcttcacttaaattattaatactatatcgtgacatttatgtggatacacattaaactacgttaaaaatgtattaatttgaaaatcttaattaaattaaaaatacccctcgatttcaatttaataatcaagggataattatatggatttttcattataaaacgcatcattaataagcaaattctatttatgtgctgcttcttgtaatttcttaattgccgttctctgaagtcgtgatacatgcatttgacttaaaccgatacgctcacctgtctctttttgactcaaaccctcaataaacgtacattgtatgatttctcgttcgcgatcagataatataggtaatattttttctaaaatcatacgtttttcagttaagtcataatggtcatcttgttgtcccataatatctaatagcgtaacagttgaaccatctttatcagcttcaatggaatgatcaacacttaacgcattataactttgtcccatttccattgcttctaacacttcttcttctgaaacttctaatcgatcagctatttcactgatagaaggtgaacgctctaattcagcggttagttcatcgctcacttttttgattcttggtccaatttctttaatacgtctcggaacatgtacactccaagttttatctcgtagatatcttttgatttcaccgattacagtaggtactaaaaaggcttcaaacttccgttcaaaggacatatcgaatctatttatggcacctattaaaccaaccataccaacttgaactaaatcttcgtgatgtgattgtcctttagaatatttatatgccaatgactcaattagtttttggtaatgtttaactaacttatcttgtgcatctgtattcttattttcttggtgttctttaatccattggttaatttgctcaggtgaaacttcattagctgatttcgactctttcgccattatttcgcacctgctctttttttatatacttagtcatactgattgtcacaccagattctttatatactgtcacttcatccattaaagattcgattaaaaataaacctaggccaccttcgcgtaaaaagtctatattttcgtctttatcgtaaggacctatttttgatttagttgtttcataatcaaaactgtcacctttatcagaaataacaattttaattttatcttctaaaatttcaaaatatatgttaataatgcctacattgtttttttctttgtatgcatgtttaactgcatttgtcacagcttcactaactgcaatcttggcatcttcaatatcatcatatgtagcaccagctctcgaaaaaacgccagaaagtgttaaacgaattaaacttacatactctgccgatgctggcacgcgcatttcgataaaatcttctttagattgcatgttattcgacctccgttccttcattaacatgcattaaatccttaagaccagtaatttcaaatagtctaccgatacgatctgacacacctaaaatgtatagttctttatcattttggtttaatgcttttaatgtacctacgaataaacctaaacctgtcgaatccatataactcacattttctaaattaacataaatatcacgagttccatcttgtctcataggtgttaaaacctcttctaattcaggcacagtataaacatctaattctccaccgactttaacttcgtaaaatttatcttgagtggttgtttctatattaagattcatttcattacactcctacttattaaaaatatttatcttcattttaagcgctgtatccaccatatttatatttcaaattattatatacccatcgaaataatttctaatcttcttttttaaattaatttactctttttataatcaaaatagtcatatcatcttttttatttgggttttgaagttttaaaattgcttcatagataatttgaacaatatcttgtgggtgcatatgtttatgttttttaatatattctaaaagtttttgtttatctataaaggtaccttcactatttctagcttcagtcacaccatccgttaaaatgataattaaatcatcaaggtatattggaatttcttgttgttgatatcgtgtttgtgaactgattcctaacactctacctctaactgaaatttcttcaaactcttctttttcagcgcgataaatatatccaggctcatgaccagctgaactacaatacaataaatggttcatttcttcatataaaccataaaacattgtgacgaacatattttggttaatattcttttcaacaacacgatttaaacgttttaagccatcactcggtaattgtgagtgtccataagaatccatgccaaactttatcatactcattgctaaagcagctggtataccttttccaatgacatctgcaacagcaaagctcattgtgccatcgttatggtcaattaaattaaaataatctccacttactttttgtgccgccactgaaataacgccaatttgaatactatcaaattgtggaatatctgttttaagcattgtttgttgtaagctagaagctaagtctatctctttatcgtgaacttgaagtttatctaccaatctttgataatctcgataactataaccaaagcctttaacgatttcttgtaagacatctaatgtcttgaacacatcttcacgcgttaagtttaacgtcaatatatagtttttgtgaatatcgacaatgtcttcaggcaagacgtccttacgaatcacttcgtcagtgtatttctcacacttttttatcaattctactttatcttggcacgttaaactttcatcaattaaacccttataatgttgcttaaattcttccacgattagttgcctcctcacttcccttacaaagcaaatgcttaagcaaggataattatgattcacttactaacatttatttaattgcacttatcaattttgtcgtttgcaattttgctgtagatgatacttttaagctaaaaaaaactttaggatggaatacctaaagcctaaaaaacttaagacatccttttataataaaaaatatgaatatcataactggtatttgctaaaatctttgtttataagaaaattcttcgttcagaatttagaaatagttataattattataaagttattgtcttttatatcaatattttatttatctctgaaaaatacatataatagacgcctaatttttctgatgagctactgcattcagccctaaactaatcattagtgcattatctacttctttcattttatcatcggataagtacgtcagtttttctttcaatcgttttttatcaagtgtacgaatttgctctaataatataactgagtctttatccaatttatactttttcttttcaatctctacatgtgtcggtattttcgctttattaatcctaccagttattgccgcaacaataactgtaggactatatttattaccagtatcattttgaattatgactacaggtctgactcccccttgttcagatccctgtactggtgataaatctgctaaataaacatctcctcgtctaatcattcattcgttgaattagaagataaatatgtttcgttgcaatcgcatgcttcacactctatcggaaaagcttcgttcgctagggagagatttaaatcagccatttgtgaatatccttcttttaaagattgttctaagctatgacttctattttgactaaaagataacatatgagaacctccaattgattccaaaagttattaaatgacctttaattactctaatgataacaaattttatatgcactgaccatattattttaacaattcatttgttacaaaacgttgatcaccatcatgatagattcgcggcaaacgtctcgacaagttgcaaagcacttcataattaatagtatgttgcttttcagctgccacctctaccgactgtggactttctctatgattatctattaaaatcaccgaatctccagctttaacttgatctggcacttttacaattgtctgatccatacatacgcgaccaataacttcgcattgatgaccatttacatttacaaagctaccttgcataatgcgtaaatagccatctgcatatccaataggtaacaatgctattgttgttggatcagtagctgtataagttgcaccataacttacagactcaccagcttgtagcgtctttgtttgaactacattagcaattaattgcacacttggtttaaggtgtactttaactttttgctgtacatactctgatggataatatccataaagagaaattcctggtcttattgcattacagaattggcaatccattaatagagaacctgctgagttctgacaatgtatatattcaggtttaattgcttcattgaccatatctttaaaacggtgatattgttcagttgtcatatctcctggttcgtcagcacaggcaaaatgtgtaaacacgccttcaaatacaagttgctcatattgttgaatgatttcaatcacttcttgatacgttttagtatctttaatacctaaacgtcccattcctgtatctaatttaatatgcaaccataactttttctcttgctcaccagaaatgtttttaattgcttctttcaaccactgtttagacggaaccgttaaggcaactcggtgttgtatcgctttatcaatatctttagctggtaacacacctaagactaaaattttagcagtaatcccatgcattctaagttctatcgcttcatctaacgttgctacagcaaaaaatgtggcaccattttccattaaatgacgtgctactttaacactacctagtccataggcattggctttaacgacagccatcactgttttatttggatgcaatgtactgaatactttgaaatttgatgcaacagcgtttaaatctacattcatatacgcagatctataatatttatctgacatattacttcctcctgtaattcccacacgttttaaaactagatcttaattatcattgtataacaaatttaaaatgctgacttttctaaaaccacttggctcatcgcataatgctcagtgtgtgagatactaacatgtacgatgaacccttcgtaatcaatctttggtttgccaagttcgtcgttgtaacagtctacatcgttaaaagctacatgttttcctaagcctgtgcctaatgctttactgaacgcttcttttgtagcaaacctgccagctaaaaattcaattttacgttgctcatgtgtgaaattgttgaatttgtgctgttcatttttagttaaaatccgctcaaccaattttggttgcttactatataacacttttattcgatcgatttcgattaaatctacaccaattccatgtatcattgattattcctcatttttattgttttctaaatgtctctcgttatttaaccagcgtttcaatctacgtgcttcacttctatctattaattcaatttcagcttgaccacccgctgtataaagtgtcaaagttgctaatcgatagcgtctcattataggaccaacatcgatatcaatattttgaatacgaaaatatggtattactttttcatccaaaaataaaatgccgtttcgtacacgcaaatggtgtttttcaaatgcatatctgcagtgcttatatcgatagactggcgctatgacaagcgtgaaaacagcaacaagtaatataataatcacactactaacaatggatatatggttatctaatatctcccaaaatagccagttcaaaatattaaatgctattaaaagtacaagcgctattggtatccaaaacagcacagcacttaacctcatcacttttttagcatgtggtgacataaaattataatccctcatcatttttacctctcaaataccatgatttcaatttatttgcatcttcacttcttgcgtattttaagttaatcgattgggctcccacacctttagcaactataaaactaaaattatttaaattgttgcgtttaagtaatgtatgttgccaagtgtcaaatcctataatgtgatgcgctttaaaataataaatatttcgtttcaatagcacgaaattctggatagtaatttgttcttctgtcattttaaaacccgcatgtttgacataaagatatcctttgatcacaaataaaccaataatgactattgttataatcgtaaataacaataataattgattccaaaaataacagccaattcctgccatagctatgacaataatactaggtattaaaaagtgtctgtgaaaacctgacaaaggcataccttcattaacttgttgataagataaatctggtactaaattctggataatttgatatgctttgtctcgtttaataaacggcaatattgtcacactacctgaatcattgtcatcatcttcgatttttttattttcaaaatcacttgtgatgataaaatgtattgctgtgtagccaaataatcttcgtatatatgactgacgttcaacaacagcttgcaatcgtttcgttggtacagtcactttcttcttgttaaagagaccatattcaattttaagttgttcattttcaagcatcaccgaaaagccataaaatcttatcatcgttataatcgttccaataatatatgccgctattaatactagtaaaatgatgattaatactgaaatacttacaatttgaacccattgactaatttcatggtttaacttcgaccatgggatcaactctcttacagcgccgtaaatcggtactaaagctgctaacgttacaccaatggcgccactggtcattgccataaatagtgattctttaaaattcatctgatatataggaatgcgtttgtttttctgtttaagcatactttcagtgttctgcacttcatctaagcgaccttttgcgatgtcctccacattaccttcaatggcatgattacagttgtcattctgctcagtactagacttttgcgccacttctgtcttcaactctgtttgcaattgatcaatatagcgttcaagatattcaccttgctttttcgaaataacgcttaagacaataccatcacttggtgttttgatttgtaaatccacaccaccaataatttgattgacgatcccttgtgtcatatcaacggactgaatacgttttatatttaattctttacgctttttattaaaaatacctgttgttaaaatgaaataattatcctcaatccaatatcgcgtgttcataattccgataatttgagaaatgtatgatattaaaaagaatacaaatacaatacctatccataaatatgattcgggattcgtataatcaaaatctttcaattgaaagataacgaaaataaaaaagacgactatgttttgtttgatagcattgattatgccattaaaatatgaaatcggatgtaatttttgaggttcagacatcactttcaacccctctcaaattcgacatagttctcgcttcgattattttaacatcgtcatgagacatcatcggtaaataaatagtatgacctgcagtcataaatccaactttatacaaattaagtattttactaattggattagatttaatcgacaagtattgtaaacgttcaattcgactcgtctcttctttataaattaaaaatgatgtacgatattgtacactgagttgatcaacttgataatagcgacagtgatattgccataaaggcttaataaataattttattgtgctcagagcacctaaaaccaacaaaatataaagtaggtaatgtggccattcaaatcttatccatataaaataaaaaatgacatacacagctacactcaatataaattctaagccattcgtaatgtagtaatacaacaatgctgacttaggactcttagataacttagtataatctgacatatacccctctccccaaataaaaattatacggatttataatctatttcattttatttttatatgttgataattatagcatatggaatatttcatgctaatttattcttcctaaaggtacatctaaaaatttagttaagcagaaagtgcttgaattgctaaaaagacaccatgttataattttatcaacatgatgcctttcatctataatcaatctttcatcttatcaagagcaatatttagttcaagcacattcacataatcatttgttaacacaccacgctgcttacgatgttgaatcaagtcggccactcttgaagtagatatatgacgagcatcagcaatacgatgtgcttgcttcaatgcattttcaaccgtaatatgcggatctaagcccgacccagaacttgttgcagcatctattgttacatttgaattaccaaatttatcacgatgtttcacgcgtgctattaattcggtgtttccattcgattcattacttccacctgataatacaccgtttttatataatttttcaggattcatattataatcaactgcactcggtctcccgtgaaaatatcgtgtctctgtccagtgctgtccaatcaattttgatccaactatacgattgtcatacgtaattaaactgccatttgcttgttgataaaaaaatatttgaccaattaacgtgatagctaatgggaataaaaatccacataataccatagttattatcgttaaacaaatactatttcttatcgtattcatggtacaggctccttcctctttacacaaaaaattgtacaatcatatctattaatttaatgcctaaaaacgggacgattaatccacctaatccataaatcaacatattatttataaaaattctatcaatgctgtaaccctttacttttacacctttcatggcaattggaattaaggcaacaatgattaatgcattgaatatcaaagctgatatgattgcagatttaggtgacgataaatgcataatatttagtgaagtcatttctggaatcgttgacatcattagcgcaggtaaaattgcaaagtattttgctacgtcattagccaaactaaatgtcgttaatgcacctctcgtcattaataattgtttgcctatttttacaacctctattaactttgtaggattcgaatctaaatcaattagattggccgcctctttagcactaattgtccctgagttcatagctaatcctatattcgcttgtgctagcgcaggtgcatcatttgtaccatctcctgtcatcgcaacaatatggcctttcgcttgttcatctttgatgactttaattttatcttcgggtttacactctgcaacaaatctatcaacacccgcttcttttgcaattgtagctgctgttaaagcattatcgcccgtacacataactgtttcaatgcccatttttctcaattcagcaaatcgttctactagaccatctttaatcacatcttttaaataaatcacgccaagcatgacgttgttttcaatgactattaatggtgtgccacctttactcgatacatccatacagatagactcaatattatgaggaatattgccctgttgttgtttgacaagatttatcatactattaggtgcacctttgaatactgatatttcatttgtaatgattccgctcattctagtttcagctgtaaaaggcttatatgtgccatcaatgtctttaggcagctcatttatatacatctgctttgctaatcgcacaatactttttccttctggcgtatcatcgtagattgatgacatataagcagcgactatcaatttttccatcatttgttgattcactggtaaaaattcactagcgattcgattgccataagtgattgtccctgtcttgtctaaaatcattacatcgacatctccacatacttctacagcacgcccacttttcgctaatacattgaattgagtaacacgatccatgcctgcaataccaatcgccgataacaaaccaccgattgtcgttggtattaaacatactgttaacgcaatgagcatcgcaataggtaaaattaaatgcaggtaagatgcaattggatataacgttacaataacgactaaaaatataattgttaacgttgttaataatgtaaaaagtgcaatttcattgggtgttttatttctttctgccccttcaactaaggcaatcattttatctaaaaaagatgtacccgcttcactctcaacacgtatttctaaccaatcagatgttacaagtgtaccgccaatgactccatcaaaatcaccacctgattcttttatcacaggtgcagactcaccagtaattgcagattcatcaacggttgctaatccatttattacaacgccatcagcagggattgtttctccgttttctacccgaatagtttggccggcttttaactctgtggcgttcactatccgatacgctccattttcttctatcaatcgagcagttaaatttgattgtgcttgtcttaaactatcagcttgcgcttttccacgaccttcagcaaaggcttctgaaaaattagcaaacaatatagttattaataatatgatgaaaattgtaatcaaataacctcgcgatagatagttagttccaaatatgtcaggaaaacatattaatatcaacgttaaaatcattccaacctcgacgacaaacattatcggattttttattaattgtttaggattcagcttataaaaactcattttcaaagcttctatcaccattgtttgattgaaatatttatttacatgatgcattttttccatccctttactttattttaaagttaaaaattcaccaataggaccaagtaatagtactggaataaatgtcaaaccacttagtaaaacgataaatacgatgagtgatacaccaaaataaggtttatcaatcgctatagtatatttatcttggtggtatgattttttattcactaaacttgatgcaatcattaattgcaaaataattggtatataacgagaaagcaacataatgattcctgtagagatattccagaatgttgtatcatctttcagtccttcaaaccctgatccattgttcgcagcagctgacgtcatttcatacatagcttgtgagataccatgaaaagacggattcgttatactttcacttgctccaggaatcataaaagtaagtgctgaaaatactaaaattaaaattggatgtatgagaaagactaagacaatacatttcatttcacgggcgccaattggcatatttaaatattctggtgttttaccaaccatcaaactgcatataaacaccgtcagtaagacatatatcaataaattcatgagtcctacaccttcgccaccaaatacaacatttagcatcattaataccattggtcctaatccacctagagacgttaagctatcatgcatgttattaacagaacccgttgtaaatgccgtcgtaataactgtaaatagtgctgacaaacctgctccaaaccgtacctctttaccttccatattcggtccatgaatgcctaaattcgctagtattggattaccacgatactcactccacatagttaatgtaagaattgctataaaaataaaaaacattgcgacaaataatatcagcgcatgacgatgcactcgtttaccatgtctacttaacatgcgaccaaataagaacaacattgacataggaagtaacatcatactgcccatttctataaaattgctcaaaatatttggattttcaaaaggtgttgcagaatttcctgctaaaaatcctccaccattcgtaccaaggtgttttattgattcaagtgatgcaataggtccaaatgcaatatgttgaatatgtccgcttaaagtccgaatcattaaattagcatgcaacgtttgtggtacaccttgagtcatcaataaaatactaattaaacatgataatggtaaaagcactcggacaataaaccgaacaatatcttgataaaaattaccaatgatattagtcaatccggttaaacgtctcaacatcgctatacaaacggcgtaacctgatgcactagatgtaaacattaaatatgtcattacaatcatttgcgttaaatatgtcacacctgattcaccgttatagtgttgcaaattactatttgttaaaaaagatattgctgtattaaacgctaaatctatcgattggtttaaattatgatttgggtttaaaaaaagccattgttgaactattagcaatacaaatgttataacccctataaatccattgaatgccagaaaatgtttaacatatgttttagctgacatgtgttctaaatctgtgccgataattttaaaacacatattttcaaatctagtaaatattaaatctactcttgacgattgcaccaatgctacgcgatatagatatccactaaaaacatacgcaatcataaccatcattgttagaaacaaaattatttccatgataaccctcacttaatatatttttaaaatttttcactacgaattaaggcataaaataaatacaaaactaatgcaataactactaataataaaacgatgagcattgccataacctccttacaacacaacaacatcgtaacaacttgtttatgagagaaatattaattttcaaactcagttattaagaaatcattaagatgtgtatgcagaaataaattttatagcatttaattgtgaagaatattatgatattgctatcgaggtgaaggttatgtcaaacactgaatcgctaaacataggaaaaaagcgtggatctttaacaatttacatcggttacagtccaggtgttggtaaaacatttgagatgctttcaaatgccattgaactatttcaaagtaacgttgatattaaaataggatatgttgaaccgcatcaacgtgatgaaacaaatgcattagctgaacaattacctaaaatcgcaaccaattttactaaacatggtagtcatcattttcaatatttagatgtcgaccgcataatcgaagaatcgccgacaatagtacttatcgatgagttagcacatacgaacatttctagagatcgtcatgagaaacgatatatggatattgaagaaattttaaatcatggtatcgatgttcatactactttgaacattcaacatattgaaagtttaagtagtcaaattgaactgatgaccggtgtacatgttaaagaacgtgtacccgactatttcataatgagcgccgatgtattagaagtcgtagatatctcacctgaacaattaattaaacgcttaaaagctggcaaggtatataaaaaggataggctagatgtagcatttagtaatttctttacgtatgcccacctaagcgaactgcgtacattgacgttaagaacagttgccgacttgatgagtgataaagaaaaaatccgacacaaccataaaacgtcactcaaacctcatattgctgtggcaattagtgggagcatttataatgaagcagtaattaaagaggcattccatattgctcaaaaagaacatgcaaaattcactgctatttatatagatgtattcgaaaaaaacaggcaatataaagatagtcaaaagcaagtgcatcaacatctcatgcttgcaaaatcattaggagcaaaagtaaaagtagtttatagccaaaccgttgcattaggattagacgaatggtgtaaaaatcaagatgtaaccaaattaattatcggacaacatattagaaataagtggcgagactttttcaataaacctttaattgaccatttaatgtcctttgaacatagctataaaatcgaaatcgttccaatcaaacaaatacctgttgaattgaaaatgaacaagtcaccctatcgtcctaaaggcaaacgtttcgctatagatatgtttaaaatgattttgattcaaataatttgtgtaatgatgggactgtggatttatcaacttgataagcatgagtctagcacgattattttaatgatttttctcatcggcatcattttattatccatttggacgcggtcctacatcattggctttttagcagcaattattaacgtatttgtttttaattatttttttacggaacctagatatacatttgaagtataccgctttgactatcctattacatttatcgttagcattttaacaagtattttaacgagtgctttattaaaacaaattaaattccaatacgccattactaaaaggcaactttatcgtacagatttattatttcaatttaatgattcgattaaacaaacttatacagttgaaaacttactaataaatgctggataccaaattaatcaattattgcaacaatcaattactatatacgttatcaatcaatccaaagtaattaaaacaataccattgcaaaaccatatcaataatacgactcaacagcatgaacaagcattaagctgggtaattaaaaatgaaagacaagctggtgcaacaacagatacatttccaggcattaataaatggttgataccaattggcacatctccgattaaaggcattctagccattgattaccaaagttctcaagtgattaatccatatgatgcatcaatattagaatcaatgttaaatgaactttctctcgccgttgaaaatgtgatgttacttaaacaaacgagagaatccatgttacaggctgaacgtcaactgacacattcaaattttttaagatcaatttcgcatgacatacgtacaccgttaacaacaattatgggaaatttagatattttagtatcacatagtaaagatatgtctatcatagaaaagaaacaattacttgtgcatagttttcaagaaagtcagtatttatatctattagtgacaaatattttatcattaacaaaattacagtcatcaaatgttcagataaaattgcaaccttatctcgttagtgaattagtagaagaaatcgatatgattttagaacgtcgtcatttaaaaaagcgtataactgtatcatcctcagttgatttacagtttatacacattgacagtaagttgattttacaagctttattcaatttgattgaaaatgcagttaaacacacttctactgacaccaaaatcaatttatctattcgttatgctagcgatgaacaaatcgaatttgccgttacagacgaaggacctggaattagtttagaagaacaacaaaagatattcgagcctttttacacaggatcaaataaatattttaaagataaccaaaaagaaagcatgggactaggcttatatttagtacagactatcctacacaaacatcaatcaaacttacaatataaaccgaaccaaccacacggcagtatattctatttcaatatagatacagactttaatgaaggagacatataatgcaatctaaaatattgataattgaagatgatcacgcaatcacacatttacttgatgttgcattaactttagattattacaatgtaactacagccgaaaatgccacacaagcacactttaaaattcaaattgataaaccagatgtcattttattagatttaggtttaccagataaagatggattatgtttgatttcagaaatcaggcaacatactgacattcctatcattgtaataagtgcaagacaagaagaacaaacaattattcaagctttagataacggtgcgaatgactatatgactaagccttttaatgttgatgagcttcgggcacgaattcgagtcatcgaaagaatcgctaagtcacatcaagaaactaacattgtatttactaacggtttgttaagcatcgactttggttccaaatctgttgttattaataatcaggaggtacatttgacgccaaatgaatttagcttgttagaactattgtcaaatcacaaaggaaaagtactcacttatgagatgatattaaaacgaatatatggctatgttaataagactgaaatgcctagtttaagagtgcatatgacatcattaagacaaaaactttcacaatgtcatgaggacgcaaaagatattattaaaacacatccacgtattggttatcaaatgttgcagtggaaagagaaataattaaataaaaaagatcgctgccattaaacgaatgattggcagtgatcttttttatattcaacttattatttattgcgcactagtgtcagcaaaatgccctattgttttttacaagcacatgataccgaaattactttcataaaatttatttatggtcgattattcttagttttagtggttgttatattctaaattcatatttatatttaaacagaatgatataaccgcacacagctctcaatccaattaaatatttaacctttaaaacgttagtattttgatatctaaagagaatcagttattgaaaacaaaaaagagctcaagacattacatctttaagctcttaatctataaattatttttgatggtcagcaaatgtgcgacctttcataggtctgcttccaccgctgctcttctctttacggtcgaatttttttgtacttttcttcttatttgagtatccttttgaacgtttactcttaccgtcaaatttaggattaccacgcttactatttctgttacgagaaccacttggtttaccgttacgacctttacgagataatggtttttcaaaagttaattgaacttcaacttcatcgttcgcttctactaactcttgtaaaagtgcagcaactaaatcaacatcgttatattcatttaacaactctgtagaaatgcgtttcaagcgtgattctgactctttagacatccagttttcaactttttctttaatatcatcttcacgtgcttgaagtacttctttgcgatgtggtggacgtaatgcactcatctttctaccgttagcatcttcaatttgtctaatgtaatccatctcgattggatttacaaaagtaaccgcgataccttctttaccagcacggccagtacgaccaatacggtgtgtgtagctttcagtgtcttgaggaatatcaaagttataaacatgacttacaccagaaatatctagtcctcttgctgctacatcagtagcgactaaaatattaatttggtcatttttaaatttctttaatacttctaaacgtttcgcttgtgtgatatcaccatgtaatccttcagctttatatcctttagaaatcaaagcacttgttaactcatcaacacgacgttttgtacgtccaaatacgattgctaattctggttgatgaacatctaggaaatttgtaaatgtatcaaatttctctaattctttaacaattgtatagaattcttcgatttgtggatcagacatttcattattcattgtcttaatgatttttggtgatttcataaattgttgtactaaagcttggattgctttaggcattgtagctgagaacaacattgtttgacgttgtgctgctggaattttatccataataaatctcatatcatcgatgaatcccatattcatcatttcatcagcttcatctaaaatcaaagtatgaattccgtccgtttttaatgtgcgacgatttaaatggtcgataacacgcccaggtgttccgactacgatttgtgggccttttttcaaggctttaatttggcgttcgataggcataccaccgaatacagtaacaacttggacaccttgtccacggctaaattctcttaattgttcagctacctgcattgccaattctcttgtaggtgctaaaatcaacgattgaaccccttgtttccctactactttctcaattaaaggaataccgaatgctcctgttttacctgtaccggtttgagcttgcccaaggatatcaattccttgtaacgcataagggatactgtctttttggataggtgtcggctctttaaatcccattgattcaagtgactgaaccgtattatccgaaatccctagttctttaaaattttgcaaaataattctcctttttacctgtttatttctcaatatacttttgcatataagttcattaatatttcatcaacttctatatagtaccaccaaaaaaatttaatcgcaataaagcaatttgcgaatatttattagaatcacattaattgattgtcatatttttgtcaaaaagctagcattagataagatgtaagcgttacgcatcattcgaataatcattataaaaaattttttataaaatacgtatatcgttaacattccacaacaaattttactgaaacacatgtgaaattagacattataatactacatctttttgtgaaatattatataaacatgcaaactacttcctatataaagtgtgtatattgaattaacctggatttagtttcaaatttatagatttaacataaaaagaaaaaggcaattttgtatttacacacaaaaccacctcttctttgtaatcttttagtattaattcaaatcatttttataagtaaaatgtcgctcgactaatctctaagaaattaaagcatttacgacttcttctaacttcataccacgtgatcctttaactaatacacggtcatgcgcttttaaatcgcttgtcaaaacttctatcatatcgtctttagaattgaagtgttgtgctttttcgacatgttgctgacccgattcataaatatacttcgcttcattaccaaacgtatacaacacatctatatgcttttcttctaaataattacctacactgatatgcatttctttgctattttcacctaattctaaaacatctcctaaaattagaatgcgacgtcctgtcaaagtactcagtgtatcaatagctgctctcatacttgtaggacttgcattataggcatcatttatcacagtgatatcattttctaatgtatgttgttccatacgcataccagttaagctgacattttttaaattttgatagattgtgttatatgtcaaacctaattcatgaccaaccgcaatggcaattgtcgcatttttcatattatgctttcctaatattggaagatcataatgttctttattattaatcgtaaatgaaatacctgtagtatctctatcatcaacagaacaaactaatgcattatcagtagcaacaccaatactaatacattttgcattttcaacttcattaacatgcggtttcaataatggttcatcgccatcatatataaacgtaccattatcttttagacctattgtaatttcagatttagctttagcaatcccctcgcgcgaacctaaatcttgcatatgtgactcaccaatattagttataactgcaatatctggttgagcgaggtttgacagaaattcaatttcatggaatcctgacatccccatctccaatattgatatttcagtatcatcatctaattccaaaatagttaaaggtagaccaatttcattattgtaattaccttgcgttttcttaactttaaattcagtatgcaatacactttcaatcatatctttagtcgttgttttaccattagaccctgtgacggcaattactttagggtttacatgtctcaagtaagcttgtgccaattgctgtaatgccgttaatgtgtcttcaacccatataataggcccgcttacattttcatctatagatgtacctttttgataaaaagcagccccagcaccatcttgtaatgctttagagacaaagcgatgaccgtcaacattttcacctttaaatggtataaataacatatttttagaaattgatcgtgaatcaattgtgactccatttatctcttgatttaaaaattgatcttcaatttcacaaggaatccatgattgaatttgctttaatgtaacattaatcataataacaacctcagttagtcaattttgtatttatttttctgtttatcctggtgacgttctttagcaagctcgataagttttgtaatcaattctggataagataagcccatattttcccataattttggatacatactgaaagccgtaaatccaggcattgcatttgtttcattaatatatatttggttgtcttctgttacaaagaaatcagcacggactaaaccagaacaatctgtcgctttgaatgcctctaatgccatatttctaagcgttaattgaacatcttcgtctaagtcagctggaatttgtaattgaaccttaccatctttatatttcgatttgtaatcgtaaaacgcgacatcttttacgacttcacctggccatgtcgcttcaggatagtcatttcctaaaactgctacttcaatttcacgtgcgttaacgccttgttcaataacaagcttacggtcaaattggaatgcttctttaataccttctttaagttccgcttcattattacatttactaatacctacacttgaccctaagttagcaggtttaacaaagactgggtaatttaatttatcatttactaattttaaaatgttatgttcatatttttcatattcagaacgtaagaaactaatataaggtaactgtggtaaccctcgatgttcaaataattgtttcattacaagtttgtccatagaacttgcagctgacaatacaccatttcctacatatggtacatccaatacttcaaaaagtccttgaatcgtgccatcttcaccattaggaccatgtaataatgggaatactgcatcgtatggttgtcctgaactaccttctttcaatagctgtgaaatctcaagcgcctctccattttctaaatgaagctcatcagtagatttaatttcagttgtaatattattttgctttctccaatcaccatcattggtaatataaatgatatcaacatgatatttgtctttatctattgcatttaatacattttgtgctgtcagaatcgatacttcgtgttctgcacttttccctccaaaaacgatacaaatattttcttttgtcatttcgttttcctccaatgatatatcagggtttgctaccttaatataaattaatattgatttagtccaattgttaaatgatttattcgcatctttgaatcttaatagtatcacattttaatgctattttgcattttaaaaacgaggcgttatgtgtctgtatctatgttgattcatttataatcagaacaatattcccttctattttattcctaattcaaattgaaatctatagctgatatcactgtgatattctagctaatttttaaaaagtcatgtaaaattgatataaacattagtgagtataaaaggagtttgcaatgaattattcatctcgtcaacagccggataagcattggcttcgcaaagtagactgggtattagtagccactatagctgttttagcaattttcagtgttctgcttattaactcggcaatgggcggtggtcaatacagtgctaattttggtatcagacaaattttttattacattttaggtgcaatttttgcaggtatcatcatgtttatttcacctaaaaagattaaacattatacatatttattgtatttcttaatctgtctattattaataggcttgctcgttattcctgagtcacctattacacctattatcaatggtgccaaaagttggtacacgtttggccctatcagtattcagccatctgaattcatgaaaattattttaattttagcattagcgcgtgtcgtttctagacataatcaattcacattcaataaatcattccaaagtgatttgttattatttttcaaaattattggtgtctcgttagtaccaagtattttaatattactgcaaaatgacctaggaactacattagtattagctgcaattattgcaggtgtgatgttagtaagtggtataacatggcgtatcttagcacctatcttcattacaggtattgttggtgcaatgacagtcattttaggtattctatatgcacccgcattaattgaaaatttattaggtgtccaactgtatcaaatgggacgaatcaattcatggcttgacccctatacatatagtagtggtgatggctatcatttaactgaatcacttaaagctatcggttctgggcagttactaggtaaaggatacaatcacggtgaggtttatatacctgaaaatcatactgactttatcttttcagtgattggagaggaacttggttttatcggttctgtcatattgatcttaatatttttatttttaatcttccatctaataagattagctgcgaaaattgaagatcaatttaacaaaatctttatcgttggtttcgtcactttacttgtgttccatattttacaaaatattggtatgacaattcagttgttaccaatcactggtattccattaccatttattagttatggtggtagtgcgctatggagtatgatgactggaataggtatagtcttatcaatttattatcatgaaccaaaacgttatgtagatttataccatccaaaaagtaattaatttaaactattttgagtttcaaatatcataacttttcaagacgacgttacatagtctatttatgtcgtcgatttaaaatgtcatatatagatattactcgataataacaatccctctttgaagtacacattgtaaaatgtacactctaaagagggattttgttatatagtacttgctttcattttagtaaatccagtcaaaaaaactatcatcgaatagtccgacgatagctttaacggtgtgtgattcacaatcacagtcaattattttaattcgtgacttactttattagatgctggcaaagtattaataatgtctaaacgagatttagtttttttaatattcacacctaatgatgacaatagtttgactacattttgaatcttttcaggacgtttcattattatcacctcgtttggatcgctttctatattatcttaccctattcgacatacctttactacatcatttacaaaatttttaatttattttcaaaattaaaatctatagcgcactctacattataccctaaaatacaattttgtatccttcatcatagatttctttttcaatactattcaaatttgctggtgtctcatacgataccgttacttgaccatcaattatattaatattcacttgatgaacacctatcatatttgaaatgcgttctgtcaattgacttacttgttcttttgtttcaattcccgctgtgtaaatcgtattttgatgtatcatcttaaactcctttagtctttaatcaatttttgaaaagtcactaataactcttccattgcctcttcctgagcaccttgattaactttattcataatacaacttttcatatgttgttctaataactttatcgcaacactgtttaatgccgaacgtgtcgctcttatttgcgtaaggacatcatcacaatagacatcttcttcaatcatgcgattaatcgctttcacttgtccttcaattcgatttaaacgtgatttaagattcgtttttatttgttcagaatgatgtgcattatcttgttcagtcatagcattcactccttcatttacattccttactatactatatcccataaaacacaacgtcaacacaaagtgtgtttttcaaactaaattgtcatgatatttaaattgcttcatgatacaattaataagatatactactcgtttaagattttcgatgggaggtttcaaatgatagagttattatccattgcactcaagcattctaatattattttaaattcaatatttattggtgcatttattttaaacttattattcgcctttaccattattttcatggaaagacgttctgccaattctatctgggcttggttactagtcttagttttcttgcctttattcggcttcattttatacttactattaggacgacaaattcaacgtgaccaaattttcaaaattgataaggaagataaaaaaggattagagttaattgttgatgagcaattagccgctttaaaaaatgaaaacttttcaaattccaattatcaaattgtaaaattcaaagaaatgattcaaatgttgttatataataacgcagcatttttaacaacagacaacgatttaaaagtatacacagacggccaagaaaaatttgatgacttaatacaagacatccgtaatgctactgattatattcattttcagtactacattattcaaaatgatgaattaggtcgtaccattttaaacgaacttggtaaaaaagcggaacaaggtgtagaagttaaaattctttatgatgacatgggttctcgtggactgcgtaaaaaaggcttacgcccgtttcgcaataaaggtggacatgctgaagcatttttcccatcaaaattacctttaattaacttgcgtatgaacaatcgaaaccatcgaaaaattgttgtaatagatggacaaattggatatgttggtggttttaatgttggtgatgagtacttaggtaaatcaaaaaaattcggctattggcgagatacgcatttacgaattgtcggggatgcagtgaatgcattgcaattacgatttattctagattggaattcacaagccacacgtgaccacatctcctatgatgatcgttatttcccagatgtaaattctggcggaacaattggcgttcaaatagcgtctagtggtcctgacgaagaatgggaacagattaaatatggttacttgaaaatgatttcaactgctaaaaaatcgatttatattcaatctccctatttcatacctgatcaagcctttttagattctattaaaattgcggcattaggcggtgttgatgtcaatatcatgattcctaataaacctgaccatccgtttgttttttgggctactttaaaaaatgcagcatccttattagatgccggtgttaaagtatttcactatgacaatggctttttacactcaaaaacacttgttatagatgatgaaattgcaagtgttggaacagctaatatggaccatcgcagtttcacattgaatttcgaagtcaacgcctttatttatgaccaacaaattgccaaaaaattaaaacaagcttttatagatgatttagcagtatcttctgaattaacaaaagcacgttatgctaatcgaagtctttggattaaatttaaagaaggtatttcacaattattgtcacctatcttataaaatagaaatatggggagtgtaactttaatgcaacaatcagacatcattagtgcagccaaacaatatatggaatctattcatcaaaatgattttacaggccatgatattgcgcatgtatatcgtgtcactgctttagctaaatcaatcgctgaaaatgaaggtgttaatgatactttagtcattgaactcgcatgtttgcttcatgataccgttgacgaaaaagttgtagatgctaacatacaatatgttgaattgaagtcatttttatcttctttatcactatcaaccgaagatcaagagcacattttatttattattaataatatgagctatcgcaatggtaaaaacgatcatgttactttatctttagaaggtcaaattgtcagggatgcagatcgtcttgatgctataggcgctataggtgttgcacgaacatttcaatttgcaggacactttggtgaacctatgtggacagaacaaatgtcactagataagattaatgatgatttagttgaacagttgccaccatctgcaattaaacatttctttgaaaaattacttaagttagaatctttaatgcatacagatacggcgaagatgattgctaaagaacgtcacgactttatgatgatgtacttgaaacagttttttacggaatggaattatcacgactagacattggatttgtagtatgatgatgccatgaaatagcatgttgttgtgggagcttgatgttgatgccatgttactttgatgtgctggtgctacgatgcgacgttgcggtgttatggtgttagagcccggtttagtgttgatgccatgccgttacgattctatgatatgttgttgggacgttgcaatgtgtattatgccgttgtgacgttattatttcacactgttacatgtattagtgaattgctgtggaaatgttgcgacatatattgctacactgatgaatcattgtgtcaagatgacattgcaatgaagagaggctactctgttattaacctctttttacatactgaaatctcgttaatattatttcaaataaaaacagcagtaggatgactttcacatttgaaatcatcttactgctgtttctatttatcacacgttgtataatgtgacactaagtttcgctattgaagcgaaaaataatgtgcgccctataaagttaaaattatcttcaacttttagggggcacattatttggacttgctaaggttatttctttttctttttagacactacttgtgtgtttttgccttttttattgctgccgccgttgtgctctctttcatacgcttcaatgaaaggctgtacttcttttttagcgactttttcataataaatgttcgcaaagtgtgtttgaactacaaggaacgccgcactgactgaccagtacaaaccaagtgctgatgccgagcttaatgaaatccagataatcataattggtgaaatgaccatcatcatgtaacccatttgacgttgttcgtctggcatcgttttacttgatacatatgcttggataaagtataaaacaccggcaataattgtaatccaaatatcaggacgtcctaaatcgaaccataagaagtgtggatatttaaacaaaccatctacaagttggtctttaagtacaaagtataatcccatgatgattggcaattggattagcattggtaaacaacccaacatactcttaatcgggttcatgtcatactttttatatacttgcattaattcttggtttgcagccattttttcttcttgtgtacgcgcacgtttcactttttcttgaattttttcaacttctggctttgcaactttcattttttgacgcatcatatgactatttttatagtttgacaacatgaatggtaataaaataatacgaattaccaatacaaggataataatagctaaaccataattgtcgtttaataagttatttcccaaccaatccaatacatttttcattggatctacgaatgtattgtagaaaaacccactacgtttttcaggtttagaatagtcacaaccagccaaaaagaccataatacctaaaaataatggtagtaacgcttttttcttcatttttccacctctatcattatattcacataggatttattctatcacattaatgagtacgtatgaaacaataagtggaaaaatttaactaattattaaaaaaatctttgaatcgattaacagtcttttcaatattttcacttttagaaatggctgaaatgactgaaattccattggcacctgcttctacaatcggcgccacgttactagtatttataccgccaatagctacaatcggtagttgcggattcatttctttaaatgttgcaatcatttctggacctactggtgtatgcgcgtcatgcttcgacggcgtaggatatattggtccaacacctatataatcaacatgcgtcaaatcagattttgcatactcatctaaatcactaatactaagtccaataattttatcagtgaaatattgtgctatctctttgactttcgcatcatcttgaccgacatgtataccatccgcgttaatttcttttgccaaggatacttcatcattaacgataaaaggcacatcatattgatgacagagatgctgtaattctttagctaatacaagtttatcgtttccttttaaagctgattcacccttttctcgaaattggaaaagtgtaatccctgcctttaatgctgcttctaatacttcatgaatagttcgatgactcggaacatcggaggttccacaaataaaatacacatttagatacgattggttaaacatattattccacctcttgaatgcgaatccgttgttgataggttgtttcatttaaatgatataacgtatcaagcaataatggtgaaaacgtaccaggaccaccacaattttcattttcagcagctacctcagcagcaatattaaatacgcttaccgcttcaattaacgcttctatgtcaggttctgtttctctaaataaaaatccagcaataacgcctcctaataaacaaccagctccagttactcgtgctaataatggagatccattagctaatacaatggctttatcaccttgaacaataacgtcctcttcacctgtgattactattgcagttttaaatattgcgtaagcctttttcgctattgcaaccgcatcaagattagcatcactatctgtacctttcatagttgctgtatcatcaatcaacgctaatatttcagatgcattgcctttaattactgatactttcgttgatttcaataataatttacaaaattgctttcgatatgtagaagcaccaacagctacagggtcaaatacaataggtaagcctgcctcatttgccgtttgagcaatcgcaataatatcttgttcattttgtgctgttaaagtaccgatattgattaatagcgcttgtgcaactttgtaaaattcttcagcttcttcgggagcttcactcatggcagggctcgcaccaatacttaataaaccattcgctgtaaaatttttaactacatcgtttgtataacaaattgttaatgggttttcaatacgtattttatttagataattcatcgtctaatccctctttctttaaatatgcaaaatgattcactggacctctaccacggccgatttcaggcgtatattgtatactcattgaaataaactttttagccttgtatacagcctcaaataatggtctaccttttgcaagttctgccgttataactgctgaaaatgtacaccctgttccatgcgtatgttttgttttaaatcgttcattttcaaatgtttgaacaacttctttagtaaataaataatcttttgctatatcagtatcatttgaatgaccgcctttaatgatgacacctttactaccaatctcattaataaagatgcggccagcctgcataattttttcttcactatcaatggctagtcccgttatttcttcagcttctggtaaattcggtgttactacatcagctaatggcaataacgtatgctgcaagttttgctttgtgtcattatccattaatgaatcaccgcttttcgccaacataacaggatcaattacatacggaatagattcatgttgcattaaataatgacgaatcgtttccatagtatctgctgtagcaatcatccccgttttaatagcatgcggtaaggtatcattgaagacactatcaagttgttcatctacccattgatgatttaaattatgaatatgttgtactcccaatgtattttgagcaacaatacttgtaacgacgcccataccatatacaccacatgaatgaaatgattttaaatcagccattacgccggcaccacctgttggatcagtacctgcaatggttaatgctattttaggtttaatcatttacttttcctccaaattcccattgttctagtgtcatagccatattgaaaaatcgacgctcatgtatgcaactttctaaaaatacttgctttacttgttccaattccttgtcagacattgattcggctaatttattcattaatgcctcaaatacgttaattatgtcatccatttcagtactataaaaatcaaaccattttgccgtatctttttctttattaagcttatgatcactttgagagcgcttagctaattctgcataaatatatgggcaaggtgccattgcagcaattgtataaatagcattttcacgactatacgcttggaaatacatatgttttatgtaatggtcgccacatggaggccaaacttttgttttaatgatttcttcgtatgattcaccaacaatttgcgctaaaatatcatgcgcaagtacttcaccttcaaccataaattctatttgctctactaaaaattttacgtcattcatgctattcatttttggaattaacaaagcatataagtttgtgaattcttttaaataagctgcatcagcttgtaaataatgacgtaatgcatcagcttgtatattgcctaataacattttttgaataaagtcatcctcataaatatcattaatgattggctttgcagcttggtacaatttttgtgaaaattccattgtaaaaatcctccctaaataaaaaaactacttccaacatgaaagtagtttgatggcaatgttgctatactagccccatcacttcaataactactttcctacgttggtactaaccaaatcaggtcataagggtctgaacaattcatctcagccatatcattaggctcccctagtagttccttagtattcaattgcaaattaatcttagcaaacggtttcaacattttcaattattgttgctcagttgtattattatctttaaataataattatataatgacatatatatttgcgaaataaaaaagaccggaacatatcgagaattccccgatatattccaatctaaaagttacttatataactattggttagctatgcataaatggcttatgcagtaacccaatgtccagcgccaccagtgttatatagttttactgctgcggcatcttgaacactttcaggagcatttgctggtgatacacctttatatttagcaggtgctactgaatcccaagttgattgtaagaattgatacttaccagctgcacctgatgttggatttacagcatgaatattgccacctgattcacgttgagcaatttgttttagatgatcattcacatttactgatgaaccttctgatgcttttgattcagttggtgttgcagtaacttgtgaattgtttgatgttgatgcttgtggttgctgagtttgagcattttgtggtgcttcaacttcttgtgattgtacttgattagcttgatcagctgatggtgcaacattattagttgcaggtgcttgtgcactcatgtctgctccattagcacctgttgcatggtaattccaagcaaagtatgtaccatctgattcaaagtgataagtaaacccttcatagtcaaatgtataattataagcgccagcttcaattggtttttgatttaatgtttgatcatttgattgcgccatttgcgctaaagatgctttatttaagtccgcttcacttgcatgggcttcgtgacctgcatttcctgctacgattcctaaacctactgctaatgatgatgcgagtaatgttttcttcataatcttaaaatcctcctacaagtaatttgtttctctaaaagttttacagagactactgtaacatctgtaaaatccgtgcaggttacaacaaaataaaaaaatagccatgttttttacacagtgattacaacgaaatcccccataatttcagatatgattctatcgagaattgtcatgacagtataaatgtttttcatttgcaattttttatgtaatcgttttgcaatctatgtctattttctattagaaaaactacacaaaaagacgacctacacaacagtactagtcatgtaagtcgtttttaagtgagtatatttcaagttaattagatctataaaaaatttaggatggattaaatgtatattaaggatgtttaggataattggatttaaatttctaataagtcatgattatctatattttgagagtcaatatctaaaatactatctgagagaatttcattattttgggatttaggggacataaattttatagtttcaacatataattcagtgacaaagtgtgtttgtccgtctttatcatactttcttgatctcatttgaccagttataccaaccaatgtaccttgattagtatatttttctatattagaagctaacttgccaaatgctttacagaataagtaatcacagacgatttctccattttcatctttataatttcggtgcgttgcaacacaaaacgttgcaatttttctatcctccttttcaaatatttgtgcgtctttcgtcagtctcccgacaattacgattttatttagcatgtagtgtgtgattcacctcctatgcctatatcttaattactagcttgaaaatggtcaaaatggcaaattttatataattaatagctatagcatctcgttatttgttatatttaaagaaattagtcatgaaatgaccttaaatcttctaaataattcaaaaatcataaatattaaactaatgggatgtgggaatatgaaaacttttaaagcagtaaggtttcaaattgtgaatgaacacggcagaattatagaatatgaattagaagatggcgtaataattaataaagaggaaagtggcacgggttggttgcttgaaattgtcatttctaatgagcattatgaaacatttagggaatatcaagacaatgaacagttattggatattcgtgtcgtaatcacgcgtccagccaatgatccagctttatttgaatctactgtgaaaagtattaaaaattttaaaacaacaatgtctatcgtatttgaatgtcatatttacactttacgtcaacagtatgcagaaagcttattagaacaacttattgatgatggattatctggtgaagaattaaaaaaatcatttaatcgaatgatgcagtctaaaccaaagttaaaggatgaaaaattagaagagtaaaataaaaaacattcaaagattatgccaacgcattaatctttgaatgttttttattttactttacatcttgaattgcaaatgtaagttcacaactacaagcaagttgaccatcgacagtagctttagcattacctttaccgattggccctttaattttagtgatttctacttccaacgttaaagtatcaccaggtactacttgacgtttaaaacgacatttatcaataccagcaaataaagcgattttacctttattttcttcactatttaaaatagctaccgcacctgtttgagccaatgcttcagtaattaatacacctggcattaccgcatactctggaaaatgtccttgaaagaatggttcgttgcctgatacttgtttaattgctacgcatctttgaccttcttcatattcaacaactttatcaattaataaaaatggttgtctgtgaggtataatttgtttaatttggttataatcaaaaattgtttccatggttgaaatcctccattatattaatttacagaattaatcgttaatacgttcaatgtctgcacctaattgcttcaatttgccatgtaagtcaacatatcctctatctaaatgattcaattcagtgacacttgttttaccatcagcaactaatccagctaaaattaaggccgctgctgctcttaaatcagtcgctttaacttgcgctccttgcaattgacttttgccttcaagttttgcactgcgaccttcaacattgatattcgcgttcatacgtttgaactctgcaacatgcataaaacgattttcaaatacagtttcagttactactttatgtccgtttgctgttaataataatgccatcatttgtgactgcatatccgttgggaatccaggatgcggtaatgttttgatgtcaacaggctgtaaatctccttcagctcttacacgaatcccatcttcttgatagtccaattcaacgcccatttcttctaatttatacactaaactagccatatgttctttgattgcaccacgtacaaaaatatcgccacgagtaatggcaccagcgattagtaatgtgcctgcttcaattctatctggaatgatagcatgttctacaccatgtaatgattctacaccattgattgtaattgtgtctgtaccagcaccagtaattctaccgcccatttcattaatgtagtttgctaaatcgacaatttcaggttctttagctgcattttcaattaaagtcttacccttagctaatgatgctgccataataatattttgtgttgctcctacacttggaaaatctaaatgaattgatgtaccttttaatccatctttagcattagcataaatattaccattttcaagatgaatttctgcgcctaaagcttcaaaacctttaatgtgttgctcaatcggtctacttccaattgcacaaccaccaggcaatgcaacaatagcatgtcctagtcttgctaaaagaggtcccataactaaaatacttgcacgcattttactaacatattcatatggtgcctcttcatttagagtctttgttgcatcaacgacaacagcattttcgtcctttttgtatgtaacgtcagcatttaaggttgttaatacattatttattgtttctacatcacttaaagctggaacattaactaatttgctcggtttatcagaagctaataaagatgctgtcaatattggtaatacagcatttttagcaccttctactttaacttcacccgttaatttatttccacctttgattactattttatccatcgtaaatcctccacttagaactcctattactttacatttccctattttaaaattattttaagtcattatttaattatatctagttttgattacaaatcatagagttagacttattttattaaatattttacctgcgtcgagtattgtaacaaatctacaataaaattgcttactgcagtgcctaataaaatagcaacaaatatcatacacacttgtaattgagtggcgtatccttttttaaaaaattgatctaatctaattgattgtaaagcccaataggcaatgcaaatacatacaacatgtaacactaaatggataactgcatattgtccgatataatccattttatcacctcataagattactgtattacattgtacatgaaaaatttaaataatgatacaaagtttaatacccgtttttagtaatgtttaagctaacttgctatataattctttttgcataaatatcataactataaagtatcttggcatgaaaaaatgtagctactttcaaaaaatgaaatgtcgactgtaggtagtgctgaaaggaaattttgattttagcaatctattagcgattgtaaaaagtaaaactattcttgagagtcggacataaatcaatgtctagactctatagtgttgtatttagtagtagttgacggggccccaacatagagaaattggaacaccaatttctacagacaatgcaagttggggtgggacgacgaaataaattttgcgaaaatatcatttctgtcccactcccattcctatttttaaatacacattagctgtgtttaatgataaagaacactacatcataaatctttaatggttctttatcaattcctcccgccctctcatgttttgtatctttaaatcaatataattcaaaaaagggtcgaagatatgaaatcacatcttcgaccctttatttactattttaattcagccacacgcaaacggttatttgctctctctaaagctctttcggctctatgaatatcagtattgtcgtcatcattttccaagtgagactctgctcttgctttggctaatttagctctttcaacatcaatttctcttgcagtttctgcagtctgaacaatgattgaaactttatcttttctaacttcaacaaagccatcgcttacagcaatatattcagttccatcgtgaaatttcacttttacaaagcctgtttttaaagcagctacagttggaatatgtccactcatgacacctatctcaccagctgttgtttgcataacaacgagttcaacattatcacgattgtaaacagaaccattaggagtgacaatatctaggtttaatgtattcattatccattcctcctaattgttatacttcaacacccatatctttagcttttgcaataacatcatccatgctaccaactaaacggaatgcatcttctggaatatggtcatatttaccatctaagatatctttaaagtttgcaactgttgtcttaacaggtacataagaacctttttgaccagtaaattgttccgctacgtggaagttttgagataagaagaattgaattctacgtgcgcgttcaactgtttgtttatcttcatcagataattcgtccatacctaagatagcaatgatatcttgtaattcacggtatttttgaagtgttgattgtacatcacgagctacttcataatgttcttgacctacaattgatggttccaatgctcttgatgtagacgctaatggatccacggctggataaatacccatttcagttaatttacgttctaagtttgtagttgcatctaaatgggcaaacgctgtcgctggcgctgggtcagtatagtcatcggcaggtacgaataccgcttgaatagaagtaactgatccttttgttgtagacgtaatacgttcttgtaattgtcccatttcagtagcaagtgttggttggtaacctactgcagaaggcatacgacctaataatgcagatacctcagaaccagcttgtgtaaatctgaaaatgttatcgatgaataataatacgtcttgaccttgttcgtcacggaaatattcagccattgttaaaccagataatgcaacacgcatacgtgcaccaggtggctcattcatttgcccgaataccatggctgttttcttaattacaccactgtcactcatttcgaagtataaatcgttaccttcacgagtacgttcacctacaccggcgaatacagaaataccaccgtgctcttgagcgatgttgttaattaattcttggattaatactgttttacctacaccggcaccaccgaacaatccgattttaccacctttaatataaggtgctagtaaatctactactttaatacctgtttctaaaatttgaacttctgttgaaagttcatcgaatgctggtgcttgacgatggataggatcgcggcgaacagactcactaatttcttctttaaggtcaattgtttcacctagtacattaaatacacgacctaatgtttcgtcaccaacaggtacactaatttctttgcctgtatcttttacatccatgcctctttgaacaccatcagttgaatccatcgcaattgtacgaacaacgtcgtcacctaattgcagcgcaacttctaatgttagttgtattgtaccttcttctttaggcacatcaataaccaaggcgttattaattttaggaacttcgttatgttcaaatcgaacatcaattacaggacccataacttgagttacacggccaattcccatgctattttcctcctttaaatattattcaagcgctgcggaaccaccaacaatttcagtaatttgttgcgtaatttctgcttgtctcgctctgttatattctaatgataagtcatcaataagttcagttgcattatcagtggcatttttcatcgcagtcatacgtgttgcatgctcacttgcttttgcgtctaatattgttccgtaaatcaaactctcaacatattgaggcaagattacacttaagatagattctttatctggctcaaattcataagaagacaaatgaccatgtcccttactagaatcctcttgagataatggtaatacttgtctagatgtaggcttgttttcaagaacgctgacataatgactatagtatatatttaattcatcaatttcttcttcactgtataagtctatagcatggttagctagtgcttgaacagatttgaaagaaggttgatcaggtacgtctacttgagaatactcaatgtcataacctctattttttaggaaatcaacaccttgttgccctaaaactacaatactgtattcgctactatcttgatgtttcgcttcaatatcagtaatcaattttttaagcacgtttgcactatatgcacctgctaaacctttatcactcgtgataactaaatatccacttctagtaattttacgaggtcttagcattggatggtttgtattgctacttgcccctgcaactgcagtaattgcatcttgcattttatccatatatggtgtgaattgttttgtatttttttcagctctacgaagttttgaacttgataccatgttcatcgctttcgtaatctgcttcatttttttggttgattttattcgagtatctatttctttaagagaagccactatctcaccaccttatactaaacttgtttattattcagatttgctaaagctttttttgaattcgttaattgctgtgtcaaacttctcagcatctggtaagccaccagtttctctgatttcatttaacagttcagtagcatttgattctgcccagtggtttaactcgtcttcaaaacgtgtgatatctacaactggaatatcatctaaatatccttttgttaatgcataaataatcaacacttggtgttcaactggtaatggtttgttttgatcttgttttaagacttcaacagtacgtttaccacgttctaatttacttgcagtaaattcatcaaggtctgaaccgaattgtgcaaatgattcaagctctctgtatgacgctaagtcaagacgtaacgtaccagcaactttcttcattgctttaatttgtgcagatccaccaacacgagatacagattgtccggcattaatcgctggtcttacacctgagaagaataaatcagattgtaagaagatttgtccatctgtaattgaaataacgtttgttggtacataagctgaaatatcaccagcttgtgtttcgataattggtaatgcagtaattgaaccgccacctaagtcatcgtttaattttgctgctctttctaataatctactatgtaagtagaatacgtcacctgggtatgcttcacgacctggtggtctacgtaataataatgataattcacgataagctgctgcttgttttgttaaatcatcataaacaattaaaacatgtttaccattaaacatgaattcttcacccattgttacacctgaatatggtgcaatatataataatggtgaaggttcagaagctgatgctgctacaacaatagtgtagtctaaagcgcctgcttgtcttaacttttcaacatttgctcttactgttgaatctttttgaccaatagcaacatagatacaaatcgtaccttgatctttttggttcaaaattgtgtcaattgcaattgttgttttacctgtttgacggtcaccgatgatcaactcacgttgacctctaccaattggtactaaagcatcaattgctttgatacctgtttgtaatggctcatctactgatttacgatccattacaccagtagcttttttctctactggacgtgttttagttgtgttaatcggtccttgtccatcaataggttgtcctaatggattaacaactcttccgattagttcttcacctactggtacttccatgatacgaccagtacgtttaacttcgtcaccttcagtaatacctgtgtatggtcctaaaataaccacacccacgtttgactcttcaaggttttgggctaaaccaagtacgccgttatggaattctactagctcaccagccataacgtcatttaatccgtgaattaatgcaataccatcaccaatttgtaatacagtacctacatcagttacggacatttctgactcataattttcaatttgtgagcgaagtaatgcactgatttcttcagcttttatggccatctatgtcactcctctttataattaattaactcttctaaattttctttgtaattggacaagatcatttctaacactaccatctaatacagttgtgccgactttaactctaaatccaccaattaaatctggattaattttagtatctacaattactttagataactttgtttgttgagttactagtttgacaatcttatctaactcttcttgactcaattcatatgttgactcaattgttgcaaaatcttgattgtagtgtccgttatataagctttggaacgccttgaatacgtcagctattaatgagatatgtctattatctgctaacacgtacatcatatttttaatgtatggattaatgtcagtaaatacaccattaatcaactcacgacgttgttctgctgtttgagttggattactgtcaaccattttcaattgctcaattttatcttttactgcttcatttataactgttaattcttcattaatagtttctaaattatttgtatctaatgacacgtcaaataatgctttagcatacttgttagctacttttaccattatttatcgcctgcctcttttagatacttgtcaaccaatgctttttggtcttgttcagaaatttcttttctaagaactttagaagcaattaacactgatagttcagatacttgattattaatatctgcaatggcacgttctttttggctattgatttcactttgtgctgtttcaatcataccgtttgcacgtacgtttgcttcatgaataatttgttcttgctgttgacgtgcttgaaccttagcatcttctaaaatcttttgaacttcttcttgtgtttctttaagtttttgtttattttcttcttcaagtttctgtgcatttaacttagcttgttctgcgtcatcgatatctctgttaatatctctttcacgtttatccattacatctttcaatggaccccatgcgaactttttaagtaacgcaagtaacacgatgaaagttaggacctgtacaatcacagtaccccactcaacgcctccagctgcaccaagaacgaataagttagctgtttcagtcacgggttcatgacactcctttcattaaaataatcgctagtgttatatagaaaaaaacgacgaggttaggacctactgaatttatgcgataggcacggtgcgttcatatctcaactatttaataaagttcaaagatattactatatatgcatcacgaattttgtcctatgcgctttgtcccgacctcttttatctgttaattatccagcaaatgtcatgaatgcaattactacaccgatgataggtaatgcctcaactaaacctacaccaatgaacatgatacccattaattgaccacgtgcttctggttgacgtgctacaccttcaactgttcttgaaacgattaaaccgttaccgatacctgctcctaatgctgataaaccaattgcgattgctgctgcgattaaattcataatttaatttcctcctgtgattgtatataattattgaaatttttagtgttcatctgccactttatgtgacatataaaccatcgaaagcataataaagatatatgcttggattgttcctacaaatattgaaaatgcttgccaaacaattaatcctgggatactaataatccaaccccatgctggttcgttaaagaataagccagcaagtaatgttaatagtatctcacctgcaaatatgttaccgtacaaacgcagaccaagcgttaatgttgaagtgaactcttcaaaaacattaatgattgccaatggccaaaacggctgtacataacctttaagatattgtttcgtaccacgcattttaattccataaaagtgagttaacagtattatcgttgtagacaacgttaaagtcactgttgcatcagctgttggtgatttccaccacaatgtgtgatctttcgttactatagaaaacggaagacctaacatattagctataaaaatgtacagaatcagcgttactgctaagaagtggaattgaccaccttttttccaagccatgttaccttcaatgattcccctcacgaaatcaaaaatccattcaacgaaattttgtttgccagttggtctttttttcaaattacgcgtacaaatgatagcaagtagaaaaacaagaaacgccgtaacaagtatcatcaatatacttgataaattgaaaacgatatcaaaaccgaataaattccaactcacgagcggggatttgtgatccataatctcacctctttcttaatttatttgctcacctttagtaaaggacgtatgataactacaacatatgaaatcattaaaccaataattataccgattatacttacatgcgatttattaaagtaccaaatcatacaagcaataattgcaactaagtatcgccacatatttccagttgaaatatgcatagtgtctggtcttttagctttggctaagtagctctcaaatataacagtattgattgcagaaccagtaacaccaatgattaatcctaagataaatgcatggtgtgtaaaaaggtataatcctcccaatattattaataaatacaaataatattgaatgaactgtttaaaaatgttgtagaaacgactcattttatatgcctccgtgtgactgatatcaatcatgaaaaccgttccactcatacaaactaaatgataatataggcgatttgtggtgtcaattctattcaaattgttgtaaaaaaataagcatgttcagacacaatttagacacatttagacaaaaagtctttttttatttgaaatcgcttggtttttcagtgattaaattcaaataatacttaatatgattaactattctttctgaagcgaatccatcaccatatggattaagcgcttcggacatttgatgatataacctctcatcatcaattaattcttttgcagctcgatatacgtcttgttcatgcgtaccaacaactttcaacgtaccagcatcaacaccttcagggcgttctgtaacgcttcgcaatactaggacaggcttattaaaagatggtgcctcttcctgtatgcctcctgaatccgtcaaaataaaataagattttttagcaaaattatggaagtctattacatctaagggttcaatcaattcaattctgtcatgcccccctaaaatcttatgagccacatctcggacttttggatttttatgcattggatatactaacgctaaatcggtgtactcatctatcaagcgtctaactgctttaaatatattttccataggttgacctaaattttcacgacggtgtgctgtcataagaatgaactttttgtcatggtatttatccatgatgttagatttataattgtcatcaactgtatatttcatagcatcaatcgctgtattaccagtgacaacaacactttctgaatatttcccttcatttaacaaatgcgatgcagcatttttagtaggtgcaaaatgtaagtcagctaatacaccaactaattgtctattcacctcttccggaaaaggtgaatatttatcataacttctaagccctgcttcaacgtgtccaatcggcacttggttataaaatgccgctaaaccacctgcaaatgtcgtcatcgtatcaccatgtacaagtaccatgtctggtttttctaattgaatcacttgttctaattgagtgattgatttagaagttatctcagaaagtgtctgtcctgatttcataatattcaaatcgtattttggtttgatttcaaaggtacttaatactgaatcaagcatttctctatgctgtgctgtaacaacaacaattggctcgagcattttttcttgttccaaagctttaactaaaggagccatctttatggcttcgggtcttgttccaaatatggtcataatctttttcatcaaactacttatctccgattcttctatttagtaccaaacaatctatctccagcgtcacctaaccctggtgtgatatatgctttgtcatttagcttttcatcaagtgcagcaatataaatatctacatctggatgtgcttcatgcatcttttctacgccttctggtgctgcaattaaacacatgaagcgaatatttttagcgccacgtttcttcaatgaagtaatagcttcaattgctgatgcgcctgttgctaacataggatcaacaacaatgatttgtctttcagtaatatcttgaggtaacttagcaaaatactctacagcctttaatgtttcgggatctcgatacaaaccgatatgtccaactctcgctgcaggtactaaacttaaaataccatcagtcatacctaaaccagctcttaaaattggaacgatagctaattttttaccagctaatcgtttagccgtcattttagttacaggcgtttcaatatcaacatcctgaagctctaagtctctagttacttcatatgccatcaacataccaacttcgtctacaagttctctaaattctttagtacctgtatttacatctctaatatagcttagtttgtgttgaattaatggatgatcgaaaacgtgtactttactcataaaaattactcctatctttgtgtatgtttattgatatagaggatattcagctgttaatttcgcaacgcgttctttagcttgttgtaatttttcttcatctttactatttttcaatgctaaactgatgatttttgcaacttcctcaaaagctttttcatcaaatccacgcgttgttgcagcaggtgtacctaaacgtataccactcgttacaaatggtttttcttgatcgaacggaatggtatttttgttacatgtgataccaactgaatctaaagtctcttcagcttctttaccagtaagtcctatagacccttttacatcaacagctactaagtgattatctgtaccgccagaaacaattctaaatccttcattaattaatgcttctgcaagaacttttgcatttttaaccacttgttgttgatacgttttgaaattattttctaacgcttctccaaaagcaactgcttttgctgcaataacatgctcaagaggtccaccttgaataccagggaaaattgttttatctatgtcttttttatattcttccttacataaaatcataccaccacgtggtccgcgtaatgttttgtgtgttgtagttgttacaaaatcagcatattctactggatttggatgtaaacctgccgctactaatcctgcaatatgtgccatgtctaccattaacttagcgtttacttcatctgcgatttctttaaactttttgaaatcaattgttcttgaatatgctgatgctcctgccacaataagcttaggcttatgctctaacgctaatttacgaacttcatcataattgattcgttctgtgtctttatctactccatattcaacgaaattgtagaatttaccactaaaattaacaggcgctccatgtgtcaagtgaccaccatgactcaaattcatacctaaaactgtgtcgcccatttctaatgcaactaagtaaacagccatgttcgcttgtgaacctgaatgtggttgaacattgacatgctcagctccaaacaatgctttagcacgatcaattgcgatgctttcagtaacatctacaaactcacagccaccataatatcggcgtcctggatagccttcagcatacttattagtcaatactgaaccttgtgcttccataaccgcttccgatacaaaattttccgatgcgattaactctatgttgctattttgtctctgaaattctctctcgattgcttctgcgataactttatcttgcttggtgatataagacataaaatctccccttctttcaaaaaaacttattggtatttagcacgttcgccaccaatctttttcggcctagatgtggcaatagttacaattgcctgtcctacttgctttactgaagtcctaacaggtacacatacatgtttaatatgcatgcctattaacgtttgaccaatatcaatgccacaaggaacagtaatatgttcgaccacgatcggatccttcatatgctgaaaagcgtatgttgccaaactccctccagcatgtacatctggaatgacggaaacttcttccattgttaatggattaaactgagatttttctattgttatcgctctgttgatatgttcacatccttgaaaagcaaaagtaacgcctgtctctttactcacaacatctaatgcattaaaaatagtttctgcaacttccatcgaaccgacagtccctattttttcgccaataacttccgatgttgaacatccaattaaacatatatctcctttattaaaaaaggacatatcttttaattcgtctaataacattgtcaaatctttcataaaagcccacccttcctaaaaataaaaaaggaatatagcaaagtgctacactcctctattataacttatttaactgttaacatatactaattatacagaattcctactagcaaataatatcttttaattttaaaattaaacttacaagttcttcataggtatgtacatacatttcttttgttccgccgtatggatctataacttctcctgcttcttttacatattcatgcaatgtgaaaacatgattttgcaaaccaaagtgtgcctctattaattctttgtgcgaatacgacatcgtcaaaataatatctgctttcaaatctgcttcagtaaattgttgcgataaggtcgttttagctaaatgatgttcttcaactaagtcttcaacataattcgaaacaccttgattgttcacagcgaatatacctcttgattcaaattgatgatttggcataacctcttttgcaatactttccgctaatgggctacgacatgtgttacctgtacaaacgaataaaatcttcatagttcacaccctttaataatgtgattacctgcagcttttaacatgcgattcataattgcttctgtattatcattcaactcaaagccgtatatatacgccgctgaaatattttcattttcatcaagtgaatgtaacacatcataaagattatgacttgcttgtttaacatcattgtcgtcctgacataattgaatgaattgcgcttcacttggtataaacgccaccttattactcggcacaataaaagctatagaagaccaatctttaccgtcatttccaattttgctctcaatatctgcaataattgtaagtggtgtattgggtgagtaatgcttatacttcatacctggtgcaattggctgttcagtatcattataatcagcatggacgatactattcggaagtatatctgtaatcattgctgctgttatagaaccaggtcttgcaattttataaggaaaagatgtgcaatctaaaaccgtactttctaatccttcttcactttgttcagcttgtacgataccatctatacgtccattcaaatcttgatatacatgattgaaagttgttggtgaaggtctaccacttaaattagcacttggagcagctagaggttcatttatgatttgtaataattgtctacctacagaatggcttggcattctaacagcaactgatgataaacctccagaaacttttcgacatagatagcctggctttaacggcaatataaacgaaatagggcccggccagaacgcctgcattaacttttctacgcgtggatccaaagtatatgtaaaatcttttaattgacctttactgtgtatatgaacaataagcggattgtcagatggacggcctttagcttcatatattttagctacagcttcttcatctgtcgcatttgctgcaagtccataaactgtttcagttggtaaacctattaaaccaccgtttaaaacaatgtcttttatttcattaattttaggatattgctgtatatcttcattatattctctaacatcccaaattttagtatccaacttaatcacgcctttcttatttatcataatacaaagtaaaaagctatgcacttaactaatcatagcaaaggcataacttttaattaccatttaaatgaaacgattcgatcgtggccatttatatctttaataatgtcgatttttttgtcaggaaatttatttaaaattattgatttaagtgcctcaccttgattgtaaccaatttcaaaaacaactgggctgcctttttgcataacgtgaggtaaatcttcaatgattgattcataaatagcatatccatggttatctgcaaacaatgcctgatgtggttcgaatctcgtaaccgttggagacatcgtaaccatatctttttcatctatatatggtggattagatatcaagccgttcaacttgataccttctttaattaagggctttaatgcatcccctgttaaaaattgtatttgtgattgatgcttctcagcattattacgagccatattcattgcttcaagtgaaatatcagtagcaataacatttaaatccggcttttcacatttcaaagtaattgcaagtacaccactacccgttccgatatctacgattgttgcatcatcttctaactgttgtaagaaatgcaacattacttcttcagtttcaggtcttggtattaaacaattggtattcacttcaaacgttctaccataaaacgaagcaaacccaacaatatactgtacaggttctcctagaagcatacgttgcaatgctaaatcaaacttcataatcattgcttttggcatgtcgtcatgcatgtgtacgacaaagtccgtacgcgtccattgaaatacatctaacattaaccattcagctcgtgtttgttcaaatcctttttgttgtgctaagtgaattgcttcatctaatttctctttataattcaccattattaagttctttcaatttatctgtctgctctgataaagtcagtgcatctataatttcttctaaatggccttccataatttgccctaatttttgaagcgttagacctatacggtggtctgttacacggctttgtggataattataagttcgaatacgttctgaacgatcaccagtaccgactgctgatttacgttgtgacgcatacttttgttgttcttcttgaactttcatatcgtataaacgtgcttttaacactttcattgctttttcacggttttgaatttgagacttctcagaagatgttgcaatgacaccagttggtaaatgggtaatacgtactgcagagtcagttgtgtttacgtgctgaccacctgcaccacttgaacgatacgtgtcgatttttaaatcttcatttctaatttcaatttctacatcttcaacttctggtaaaactgctactgtagctgttgaagtatgaatacgtccacctgattctgtttcaggcacacgttgaacgcggtgcgcaccattttcaaatttcaatttactatacgcaccattaccagaaactgagaaactaatttctttgtaaccaccatggtcactttcagacgcttctactatttcagttttgaatccttgtgattcagcatactttgaatacatacgcattaaatcaccagcaaaaatcgcagcctcatcaccaccagctgctgctcttatttccacaataacgtctttgtcgtcattaggatctttaggaatcaataatattttaagctcttcttcaatatttggaagttcagctttaataccactactttcctcttttaacatttctacttcttctttatcatctgtttcacttaacatttcttcaatatcagctaattcttcttttttagctttatagttacgataaacatctacagttttttgtaaatcagcttgctctttagaatatttacgtaatttatctgaatcatttacaacatctggatcacttaacagttcatttaactgttcgtatctttcttctacaatatctaattgatcaaacacttataattcctccttattattatcactaggtgctacgatatggtgcgcgcgacaacgtggttcataactttcattggcacctactaagataatcggatcatcaattttagctggtttaccatttattaatcgttgcgttctactagatgaagaaccacaaacggcacaaactgcttgaagtttcgttacttgttcactgacagccatcaatttaggcatcggttcgaacggttcgcccctaaaatccatatctaatccagcaacaataacacggtgtccacccgatgatagtttttctactatatttacaatttcatcgtcaaaaaattgcacttcgtctattcctattacatcaacattagttaagtcgtgcgtcataatttcacttgctttagaaatattaatcgcttcaatggcattaccattatgagagaccactttttctttatgatatcgatcatcaatcgccggtttaaatacaacgactttttgtttagcgtatataccccttcttagacgtcttattagttcttcggatttaccgctaaacatactacctgtaatacattctatccaaccggaatggtaagtttcatacattgagagttccacctttttcaaaacataatcgctttattatatcatatttcaaatattcataaatgtctttttcataattatatcgatattgtacatgaacaattattttataaatttgtcatgcatatttatatacagctattctaatttgttgcttcttattcgtgcgatgtttctactcaatacaaactttaataaaggcgaattttatcattatgtattaacaagatggtattgagtcacttctttgaacacagtcgtaagtaaatacccttactacgcttataaataaaaaagctgtctacaattccattattggatgcagacagcttaacgattactatattagttgtttgatttaagaccaaactttttgttgaaacgttccacacgtccatccgcagcagcgaatttttgacgtccagtgtagaatggatgtgaatcagatgaaatatctaaacgaataactgggtattcttttccatcttcccactccatcatttctgaagatgtttttgtagaaccgcttaagaatttgaagtttgtagtagtatctaaaaagattacttggtgatactcaggatgaattccttgtttcattattttcagctcctttgccctgaaccatctggaacagagttatttgtgagtttttacccaatactgtgtaattataaaggtaattaattcaaaacgcaagcccctatataatgtttattaaattataggtcgacccgttttagtactttcttctgcagacttttgtagctgcttgaagaaatcttcattattcttagactttttaagtttgcgaataaatctttcagtaaagtctgttgagtcagtgaatagatttcttaattgccataatgtgtctaattcagatttacttatcaacaattcttctttacgcgttgaacttctgccaatatcaattgcagggaagatacgacgttcagacaatttacgatctaaatgtaactccatgttacctgttcctttaaattcttcgtaaatcatatcgtccatacgtgaacccgtatcaactaatgcagttgcaagtattgttaaacttccacccgcttcaatatttctcgctgcaccgaagaatgcttttggtttgtgtaaagatgcaggatctaaaccacctgataatgtacgaccacttggtggaataactaagttataagcgcgcgctaatctcgttatagaatccattaaaataatgacatcttccccaatttctactaaacgctttgcacgttcaagtaataattcagctactttaacatggtgttctggtggttcgtcaaacgttgaatgaacgacttcagcagcttctactgagcgttctaaatctgttacctcttcaggacgctcgccaactaacaaaataaatagctttgcatctggtttgttcgtactgattgcattcgctatctcttttaataacgatgttttacctgctttaggtggcgccactattaaaccacgttgacctaaaccaatcggtgttactaaatccatgatgcgcgttgaataattttgtgtttctgtctctaatttaatacgctcatctggataaagtggtgtcaaagcttggaaatgcggacgtttcttcacttcttctgcgttatggtcattgacaaagtcaacttgtaataagccataatatttttcgttatctttaggttttctaactttcccagttactttatccccacgtttaatttcaaaacgacgaatttggctagcagatatataaatatctttttcccctttagaatagttcactgttcttaaaaaaccataaccatctggttgtatatcatctaagataccttccatataatagttaccatctttttccatttgtgcttccataatagctagaacaagttcttttttatttaatttactatagttcgtcaacttaagagttttagctttttgagtgagttccttggtagtatagtttttgtacaattcgtggaatgattcatactgaggagatgtacgttctctttcaggcatatagtttacacccatttcattattttttagttagtaagtaatagataggcatgacaatgcataaataactgtgctagcacaatcccattatgctaatccccaaccttttaaatacatgaataactatagcaaatttttattttaattacaaaatctatttataaaaattgcaaaattaaaacagtacacaaaacttaattagtcatgtgcactgttttattgcgatttttaattcaaaaatcaaatttatttaaaatagccagctatagatttcacttctaagaactcttcaataccataatcgccccattcacgacctaaaccagattgtttatagccaccaaatggtaagtctggctttctacctgcttcgtttatttctactgtacctgcttcaatagaacgagctactttatgcaatgtttctttgtccttaccaataacatatcctgccaaaccatattttgtatcatttgcaatttgaatcgcttcatctaaatcgttataagtgataactgacattactggcccaaaaatttcttcttgtgctatcgtcatttgattatttacattaataaaaattgtcggacgtgcaaagtaccctttttcaagtccttctggtttcccaggaccaccataaaataattcagcaccctcttcaatacctttattaatataattttgtacttgatcaaattgttttttactaatgatagggcctacttgtgtaccatcttctcttggattaccgacacgcacttggctaaattgttcttttaattcagctaagaatgcatctttaattttgttaggcactaaaacacgtgtaccagctgtacatacttgaccagtattattaacaactttgcctgttgttgctttagccgcttctttaatatctacgtcatctaggacgatgtatggtgatttgccaccaagctctaatgatacctttttaaagtctttagcagctttttccataattttagaaccagtaggacctgatcctgtaaatgacatcatgcgtactttaggatgttcagataaaggattcccaacgccagcaccgtcaccattaacaaggttaaatacacctttaggaacaccgactttatcaaaaatctcagctaaaatagcagctgcaaatggtgtttcttcagatggtttaagtacaactggactaccagccgcaaatgctgctgctaattttaatgatgtttggtttgtagggaagttccacggtgtaattaagccagatacaccgattgcttctttaacaactaaatcatctccgcggcgttcttcaaatttgtagttatccaatgcgtctctcgctgcaataaaatgatttagtcccatttgataatggacacgctcagataatgataaaggagcacctaactcatccgtaatagcttgtacaatatcgtcttttctgttttcatattcttttacaattttgtctaataattcttgtctttctttcacagatgtatgacggaactctaaataaacattgtctgccgcctcgacggctttatcaacatcagctttattacctttagcaactttcccgattacttcttcggttgctggatttataacttctatcgtttcattactattactttctacccattcgccattaatgtattgctttgtgtagtctctcattattctttcactcctcaagaatgatttatatattatttatccgtaatgcatacgatataaacattacattccattatgatacgctcccttttaatatgttcaaaataaaatgctttaaaattttgctgcatctaattctgtctatcttttcaaataaaaataactattcccacatcatcgcaaataatgcgaagatttagaaatagttataatcaatgctatgtttaaacgtcatgtaattatttagcagtacgttgatctgttaaatcgacatatgattgcgcccatgcttcaattggatgtaaagcctctgctaacgctttacctttttcagttagcacataaataatttgtactggactcgtagaaatgatttgcttctcaactaactcccattgtgcaagctctgacaatttaagacttaaagcacgcggtgttattgttttcaaatctcttttcatatcggaaaagtgtgctgaacagtcattacatcttgagagataattaatgattaatccattccaacttctaccaagtattttaaaagtttcttcgagatacggacatacttccatcatcttcacctctcatcaataaatttagaatgtaaacgaacacccttttttaatcagtataattattataccacaaaataagataaatctatacagtttccgtccaaatatctgcacctaaagcttttaagtgctctacaatatctgtataacctctataaatatgtttaacattgtaaattgtagttacaccctcagcaattaaaccagcaataattaaacaagctcctgctcttaaatcgctagcataaacttcagcaccatgtaatgttgatggttttatcgttgctgtgccttcatcaacttcaatatttgcacccatgcgctttaattcttcaacatgtttaaaacgctccggataaatcgtatcagttacaaatgaaggaccatttgccataaataataatggtgtaataggctgttgcaaatcagtagcaaaacctggatatactagtgttttaatatcaacaaattgatatggtgcattattattgatgcgaattctttcatcacgcacatctacattcacacctaattcactaaacttaacagttaatgtttctacatgtttcggaacaatattatttaatataacattttctccacatgctgcagcgatacacatatatgtgcctgcttcaattctatcaggtataacttgatactcagaaccatgtaattctttgacaccattgattttaattgttgatgtacctgctcccttaatattagctcccatactagttaagaagttagcaacatcaactacttcaggttctttagctgcattttcaataactgtttgtccagttgcataaactgcagctagcataatgttaattgttgcacctacacttaccatatctaagaaaatatgtgcaccttttaactctttagcttcaattttcattgatgtcgtacttgattcatcaatttcagcacctaaagctttaaatcctttaatatgttgatcaattggacgtggcccaagtggacatcctcccggtaaaccaatcacacattttttaaatctacctaacatggcacccatcatatagtatgaagcacgcaatgattcaactttattatttggtaatgcagcattttgtatttcagttgtatcaacttctaattccgtaccatttagtgatgccttaatatttaaatcttctaataaactcactaaagttttaacatcagagatttgcggtaacccttctaatttcacatgtccttgagctaataatgttgcaggaatgatagctacagcactgtttttcgcgccactgatattaacttccccatttagtgtgcgtccacctcttatttttattacctcttgagccatatcatttatctcctttgtccattactttttaattttttgcattattagcattataaattaattttactttatttgtaaaatactttattttaatcgttaaaatcttgcctttacacatacgattgattaataacgcatcattcaccttaattaatatatgatgttattacccgcttgaccatggtctaaagtctgattgttcgctcaaatattgacattattttgacagccaattcagctttagtgggattgcttttgtatgtattttttcatcaactacagcattttctatataattatagcataatcatttttaatatatttcatcatttttagcttcaacttttaaaatgcgctgtattagttcgggccttaacaacataaaaaagaagcaaacaccattctgtctgcctcttttaaaattaatatccctacgttattaataacttaaaaactaaatattaattatttagcgcggtttgaagtaccgaactctttaattttacctttaactgtttctttgatagcttcacgagctggtcctaagtatttacgaggatcgtaaacttctttgtcgttgtttaatacgtcacgaaccgcttttgctgaagcgatttggttttcagtatttacgttaattttagctgtaccaaatggaattgctttttggatatctttagttgggataccagtaccaccgtgtaatactaatggtaaaccagttgataaaccgatttcttccatttctttgaatcctaattttggttcacctttgtatggaccatgaactgaacctaatgctggtgctaatgcatcgataccagttttttcaactagttcttgacattctttaggatcagcataaatgataccgtctgctacaacatcatcttcttgtccgccaacagtacctaattcagcttctacagaaacacctttttcgtgagcgtattcaacaacttttttagttgttgctacgttttcttcaaatgggctgtgtgaagcatcgatcattactgatgtgaatccagcatcgatagcttctttacatttttcaaagcttgaaccatggtctaaatggattgctacaggaatagtgatgtttaagtcatgcattaacccttcaaccattttaacaattgtgtagaaaccgctcatgtaacgagcagcaccttcagaaacacctaaaattacaggtgcattttcttcttgtgacgcttctaaaattgcttgagtgaattctaggttattaatattgtattgacctaccgcataaccattttcttttgcatcaattaacatttctttcattgaaactaaaggcatgaaagttcctccttgagtgcttacgcacgtatttttcaaagtaattatatcaaaaaactagcgtcaatgcattgaaatactgcagattaaatgtgtattttttgaaaaatgcgatagttatactaaatgcaaacgtatacatttttatacaatttaagccgttgcataatatgtagtcattaattacaatattttataagtagattggaggataaagatgtcaaaaatcttaaacacacaactaataggtatctttaataggctagaaaaacaatctttagaaattcaaatggccgcgcaatgtttaattcaagcaattggtggcgaaggttatgtttatgtaaaaggttatgatgatttacagtttttcgaaagtttcattctacatagtgatgagcgtttaaaatctagccggaaacttgacgctattaaagactttaaagaaattgactcaactgatcgtgtattattattcgcaccattttataatgatcaagttgcattagatattcaaaaacttatcgacttagatatcgatgtagtcttaataagcaacaagcctaaaacagatgattttcctgatcatctcgtacattttatcgatttatctacaccaagacctatagtctatactgaagattacgataagattgttcagccacatgcgatggcatttaattatgtatactatgacatttatacacaaatgattgaaatgacaagagacttagaattataaaagtcactattgttatttaataccttgtcgctaacataatattaaaattatacgaaaaaccggtactttcaatgtttaacaatgaaagtaccggttttattagcaaatttatttattttgttgatattttaatgaagcttcaataaatgatttaaaaatcgggtgcggacgatttggtctagataagaattctgggtggaattgacaagcaataaagaaatcatttgtcggaatctctaccatttctactaaacgcccatctggacttgtaccagaaatcaccataccatttgcttctaattgttctctatagtcattattaaattcataacgatgacgatgtctctcttcaatttccgctttaccataaacatcttgtgccaatgtgccttctttaatagaacatggatataagcctaagcgtaatgtaccacctaaatcttcaatatctttttgttcaggcaataggtcaataattggatatggcgttgctggatctaattctgcagaatgtgcaccttcaagacctaatacatttcttgaaaattcaacagttgcaagttgcattcctaaacaaataccaaagaatggtacattgttttctctagcatacttaattgcactaattttcccttcacttgcacggaaaccaaatccacctggtactaaaataccgtcgacatctgcaaggtattcggacgcattttcatctgtaacttcacttgaatcaatccatctaatatcaatatctttagcaaaaggatatccagcatgttttaatgattcaactacagataagtatgcatcttgtaagctaacatacttaccaactaaaccaattgtaattttaccatctaaattattaacgatatctaacaactgtttccattcatcaagctgtgtttcatatttcgcgtttaattgtaaacgtttaataacgatatcatccatattttgttggcttaattgtaatggaatttcgtataaagagtctgcatcacgacattcaataacactttctttattaatgtcacagaataatgcaattttatcttttaaatcttgtgtcatttcatattcagttcttacaacgattaagtctggttgaatgcctaagcctcgtaattctttaacactatgttgtgttggcttcgttttcatttctccagcagctttaatataaggtaatagtgtacagtgaacatacataacgttttctctacctaaatcactgcgaatttggcgaatcgcttcaataaacggtaatgactcaatatcacctgttgtaccgccaatttcagtgataacaacgtctgcattcgtactttctcctgcaagtaataaacgttctttaatttcatttgtaatatgcggaataacttgaactgttccgcctaagtaatcaccacgacgttcttttttcaatacgtgtgaatacactttaccagctgttacatttgaaaacttatttaaattaatatcaataaatctttcgtaatgtcctaagtctaggtcagtttctgcaccatcatccgttacgaatacttcaccatgttgataaggactcattgtacctgggtcaacatttaagtatggatcgaatttttgaattgttacatttagacctctatcttttaataatctacctagagaagatgctgtaatacccttccctaatgatgaaactacgccacctgttacaaaaataaattttgtcatgtcttgacctcctaattattaaagggaatgcttcctcatcgtttgtaaaaataacgtaaaacataacatttgagtaagctcattcaagttgcttatttgtcgaattcgacaaaattaaattctgtttacttaccgtttccatactgctatgtcactatgtatatcatttacaactttgattattgcgttatcatttcttgatttactcaattaaataaaaaaacgctccctctcacaaattttgtaaggggagcgtataaattttatacacgtgtcctatttaaaggagcccgaataaaattttatcatctttcaactaaaagtcaaacaaaaaattatgctttgaagtcttcttcgtcttcaaaatcttcttcgtcttcatctagttcatcttcatcttcttcaatgactatatccgaatgattgatttcttcttcaacttgctcatcttcaggatcatttaattcttcttgatcatcagtttgagctggaatatcgtcatcatcatccatttcatcttcacccaataattttaagttttgatcttcttcatcatcggcgtctaaaatatcaaatttttgaattgttggtgcaattttctcttcgatatcatctactgagtaccagtcacgtaatccccataagttttcgccaacatttaaaaaacgtccatctgtatttaaatctgtgtaaaattgtacaacacgcgtttcaatttcctcatactcataatcacctaatgctctaaattcatcgatgatatcatataagttcattgtttcacctttatcattcaataatgtataagccatatcaataaatgatttttcatcaaccatttgttttgtataatcttgaattttcattgcccaatacttcctttcgaaggatataatctaaatttatacgtctgaattcatttatatatagtaacaaaactaaattataaatgacaatatcatatttcgcaatcactgttagtaatttaaatatttttcgaaaacgacataatcatcagtttgttcgatttcaacgaaattactatttagacataatggtttaaaatcattattctctccaaacagaatcatcgttatcacattaaggttgtcatagttttttcttaagtaagtaggcaattgtcgaagcgcacttgaaccaataccattaaagcgatatgatttatccacttcaatagcagcaatgttcatgcgttcaccaatctgctccaatgcaataaagccaaccttttggtcatcaatcattaaattaatgatatgtacattggtcacttctgaacgactttcttcttcaagctttaatgatgaaacatgtttagaatctaaatccaaatagtatagccgttctttaccaataggcccttcttctttagtcgcggtatgcataaatccagcacgttcgtataggttccaagcattgtcattttcagcatctactactagatatagatgattaaaatcaggaaatacaccttgaacatattgtggcaatgacatcattattttcgtgccatatccaaaaccttgatatttttcattaatcgataatgaacgaatataaacgacattttcaggtgtatcataaccttcatgctgatagtaacgatgtaatacaaaaaagccaacgacgtcatttttatcgtttattgctacattcgcaatcctatcagcatcgttaattgcatcatcaataacttctttaggtaaagatgaatatatttgttgtctttcattcaagtcaaaatcattaattgctgaacgatattgttcatcaaatgcttttaaagtgataccttcaaaacaaagttctttagccatatatttaacccctatctttttatatatgaagcatgaatccccgtattattttacctattatttcactacgataccattatttactctaagttaaataaattacttatttatatttttgcaaattttaaaattaatgtacttttcctcattacttatcattttaatcagagacttacaattacactgcgtacgaactacttttaatattgcgtcactaactaacaatactatacaacttcaaaattcctagaaaataatatatatatcttaacgtccacgtttgtaatacaaaaattgcgatacgcttacaatgttgaaatactatgacatcaaatttgttaataattactattattacttgttttttagtcattttactatactattatttaaggatagacattaataatgaggtgggaatcttatgaaagttggcattgacgctggcggtacactaattaaaatcgttcaagagcaagataaccaacgtacttttaaaactgaattaactaaaaatattgatcaagttgtggaatggttaaaccaacagcaaattgaaaaattatgcttaactggaggtaatgcaggtgttattgctgaaaacatcaacattcctgcacaaatttttgtagagtttgatgctgcatctcgaggactaggcattttgttaaaagagcaaggccatgacttagcagattatatttttgcaaatgttggtaccggtacgtcactacattatttcgacggccaatcacaacgtcgtgtaggcggtatcggtacaggtggaggcatgattcaaggactcggttatttactaagtcaaatcactgattataaacagttaactgacatggcacaatacggtgatcgtaacactatcgatttaaaggttagacatatttataaagataccgaaccacccattcccggtgatttaacagcagctaattttggtcatgtactacatcatttagatgctgattttacacctagcaataaattagcagccgttattggtgtcgttggcgaagttgttacgacaatggccattactgttgcacgtgaatttaaaactgaaaatatcgtttatatcggctcttcatttcataataacgctttattacgcaaagttgtggaagattatactgtgttacgcggttgcaaaccgtactatgttgaaaacggcgcattttcaggtgctattggtgcattatatttagaaaaatagaaaagaccatttatatgagcgttgttttaaataaacgctatataaatggccttttattttatggtctacgcgttttggaatacgtattgttccatttattatcacttaattacttacaactcaattcaattaaaatgtaagttcattagacaatttttgcgctgaaacaattgtaccaaccacgccagtttttaaatctatcgcaacggctttatgatcatctctaagttcatctagccattctccgaaaacagaaccttcaatcgtaattaaatcacactcttcaaaatcttcatctcgaacttttaacgctctgtttttaatactccatacaggcataatatgcggctttttttcgtcgctatcattttcactaatgagaataaactgcttacttccttttttagttaagccgtatacttcatcatatttcgctacatcttggacaaattctttgattctaattttatctaattccgtcatcacttcttgtgtaacagctacaacgtttagtagatgaccttcttcttccattgtttgattcataataatatggtcttgttcatcaaacaattcatctaattcataagtagcaaaacgatcaacgtccatttttacaactttatcaaatggaatatcacgacttgttaaaaatgatacggccacactttcttctgtccaaacgcctacatacgcttcacttttataatttaggcgtactagttttttatttttagaggcgaaataaatacattcatttattaatatatctctaaagaatggatatgctttataagacatgcttgaccctcactttttaaaatatgtcatacataaaatagtaaatgactccaacaagatagtcaattagacatattatgaattcaatttaatgtcatgtttttcattttaaaaattcaatagcattaaattttacgtatacacaaattcggtctataacacgaaacatatctagttactaaaaatttcaaaacgataacctttaatatacctttatcaacaaaatggcaattcttataacatagtgaaataagagtcgccatttaatattagtattacaaagtattgccatatcataaatttaattactgttgactagaatcgaaaaaacttgttacaagtgcatattcagtcaactaatgtcaacataacattgtagcaccttatgttccgaactctaacaacgttcaagttcagctaaaaatgcgcgttcattctccagtactgtttcttttgaatctccatgccaaatacagccaaaccttgatttaactttatcttcaccgtaccaatcaccatcataataagataacgggtataaacaaccttctttgacatatttcaaaatcgtattgaagaaatgtatgttatcaccttttgaatgataactataaaacttttgatatcctgaattcaactcgttagcaagtaataacatgctcgttgaaccattttgtctaaagtttaaatcaatcgcataaacgttatcatcttcatcgacaagcaagtcaaaaccagctacaccaaagaatccttgattcacaccgttttccataatttgtctacctgcttctataacgtgctctggtacattagtagtattttcatttccattataaaatccgtacttatccgttaattgcgttgctgcaccaagatattgaatgcctagcgattccgagtatgcaaactgaacgcaataattcgctttttcttcaatcttctgttcgataataagcgaattcgtttcagcagttgcctctttaatacgcgttatcgctttttgtaaatctgcatcatgataacaaatcataacgccatagccacctgctgtcggaagatcatctcccggcttaattacaaacgggaattcccaattcttaatctcgttttcaaattgctcaatttttacaacttttctttttggtaaaaacttcccatttgtccattcaggtattcttgctttattatttaaagcaacaaataacgttttatctaatgcataatattgctgattcaagattgtttcatcatgaatatattgaaaataaatctttttattttccttatatgccaattgtttaatcaagttttcgtaagattgctgattgttaaatgtattaattgagttcggtacatccttaccaatagcttgaaatagctgatgcaatttgtctgtcgcactagcttcgtgaacaataacaggtaattgatttgctattaataactccctaccagttaaaaaattagattgatgttcgtctggtttcaaccatggattcgatatatacgaaggtcttgacgtatagacaacatctttgtcatataaatcacttaacgttaagttcggctcattaccataatttgtcattacttcccattccctttcaaatgcgcatgctcttcaataacgtcttgataaacgtcttgatttgtaattaactctaaccccatcaacgccattattttagcacctttaattaatgcttcatcaccatgtacactcgcagctgcttctctaaatctatgtgtatgtcctactaaattacgtgatcctattttaatatgaggatgtattgttggcacaacatgactaacgttccctgtatccgtagagccataaccaaaatcatcatcaataactgcttcaccaacttcttcagcatatttagcaaataaatcatctaatttcggcgttttaatgaattcattcacaccgttttgaattggaccaaattcataatcacaaccagtctgtatcgcagctccacgtgcgatttgatttactttttctgttaatatatccaattctttacgcgtcattgctctagtataaaaacgagcatgtgtatagtcaggaataatattagcagctttaccgccatctaaaatcacaccatgcacacgttgaccttttttaatatgttgtcgaagttgtgctacaccattaaaataactaatcatagcatctaatgcatttaacgcttcatctgcattttcagaggcatgagcactttttccgtaaaatttaacatctaaaacatccactgccaaagtatcaatcgttttataagtttcatttcccggatgaatcattaaggcaatgtcgatttgatcaatcacgccagctttaacataagaggctttagcgctcccattctcgccaccttcttcagctggacatccaagcacaactactttaccaccaatttggtcaatcacttgcttcaaaccaattgcaccaagcacacttgcagttccaatgatattatgaccacaagcatgacccaatcctggcaatgcatcgtattctgctaaaaaacctatagctggcccgtcaagacccgaatcatatgtcgctataaacccagttgcatgcccagcaatctcggtttcaatttcaaaatcatgttctttcaaacgatctattaacgttcgagacgcaaatatttcttcattaccaagttcaggacgttcatgaattctatgactgatttcgatataactatatttatttgtttctatataatcgagaatttgttgtttttcactcattttttactatctcccttttaccctacactcattttaatcatccacaatattttgttctttcaaaatgaattattacttattctatcggttttacctcatgatgtcatctagtttttctttatttacaaaattttctaacaactaaaagcctttcataaatttataaaacagtttcaaattgtaaaacataagtcctattgttacaatttaagtattgttagaaacgcaacttacaacaaacttaagtttaataaagtaacgaatcataagcggtttatagttttgagtagttaataggaggaaatttaaaatgacaaaaatgaatgttgaaagtttcaatttagatcatactaaagtggttgccccatttattagattagcgggaacgatggaaggattaaacggagatgtcattcacaaatacgacattcgtttcaaacaaccaaacaaagaacatatggatatgcctggattgcattcattagaacatttaatggctgaaaatattagaaatcatagtgacaaagtcgttgatttaagtcctatgggttgccaaactggtttctatgtatcatttattaatcatgataattatgatgatgtactaaatattgttgaagcaactttaaatgatgtgctaaatgctactgaagtgcctgcttgtaatgaagtacaatgtggctgggcagcaagtcattcattagaaggtgctaaaactatcgctcaagcatttctagacaaacgaaacgaatggcatgatgttttcggtacaggaaaataaatcttagtcaatcaagttaatcagaaaagcagtcgaacaatgatgttacaatctccattgtccaactgctttttaatatgcttcaaagtcaaaaaatcgaacaaatgaaaaagtaaaatctttaacatttgttcgatttatttaagaaccactataatttcttaattagtcccattaacacgaactgcataggtaaccttaaatacaactgccaagtcggcaattgtttatctcctaaaggtaactttttaactgccatatagatattagctgggaatacagctagcaagaatagattgattgtatttttcaagcattgagatggtcttttaattaaaagtgcaattccaaataatatctcaaagattcctgtaacaagaaccgctgtttttcgaagcggcaaacatttcggtatgatatttctaaattgtcgttctcgtgtaaaatgcaatacacctattacactaaaacctattcctaataaatatcttaatatgttcaatcagtttcaactcctactctgtaatgattttatgaattaatgtaggcgatacaacatgatcagcaattgttatacttgaatctaattttttaacaacatcgtctacatcttggcgattactgtgaatcgttaataatgattctccttcttctactttatccccaatttttttatttaaaacaataccaaccgctaaatcaatatcatcctcttttgttaaacgtcccgctcctaacatcatcgaagcgacacctatatcgttagagactaactcagtcacataacctgattttttagctttatattcgatttgatattgagcttgtggcaaacgctctggatggtcaataactgtttcgtcgccaccttggtttttaataaatgttttgaatttttctaatgctgcacctgaatcaattgcctcaattagcaatgctctcgcttcttcaagcgtttcagctttgtttgcaagtacaaccatttgagaacctaatgttagtacaagttctgttaaatctttcggaccatgtcctttcaacgtatcaattgcttcttgtaactcaagcgcattgccaatcgcacgaccaagtggctgattcatatcagaaataatcgccatcgtattacgtcccacattattaccaatacgtaccattgcgtgcgctaatgcttcagcatcttctaatgttttcataaatgcaccgctaccagtttttacatctaatacaattgcatctgcaccagcggcaatctttttactcataattgaagaggcaattaatggtattgaattgacggtaccagtaacatcccttaaggcatataattttttgtctgcaggagttaaatttcctgattgtcctacaactgccactttattttcattaaccaatttcacaaatgttgcttcatctatttcaacatgaaaaccatcaattgcttctaatttatcaattgtaccacctgtatgacctaatccacgcccactcatttttgcaacaggaacatctacagctgctactaatggggctaaaaccaatgtagttgtatctcctacaccacctgttgagtgcttatctactttgacacctttaatatcactcaaatctatcatatcaccagaattaaccatagccatcgttaatgctgcacgctcatcatcattcatatcttggaaataaatcgccattgctaaacttgatgcttggtaatcaggaatatcccctttaacatacccatcaataaagaaattaatttcttcagtagttaatgcatgaccgtcacgttttttctcaataatatctatcattctcatttttatcatcctttttgttagagcttaggacagagcatttatacttctaatactcattttaattacatacacttgaaaattattttttgtaagctatcaatgtcaaattctatatcttgtttcaaatgtaaaataaactttctaaaatagattgattcgttacgatttcattttcccataaatgtatattcgaatcacagaaatgtttgatgatttaaagttcatttcgactcgcttaaattatgaacactatgtcccatgctcattattattattttttaatttagtaatctgaatctgcttctaagccttgcataatttgaacgcctgcgctcgcaccaatacgtgttgcacctgcttcaaccattttattgaaatcttctaaattgcgtacgccacctgatgcttttacttctacatcagcacctactgtatctttcattaatttaacgacttctgcagtcgcaccgccacctgcaaaacctgttgaagttttaacgaagtccgcacctgccgcttttgttaattcacttgcttttacgatttcgtcatggtccaacaataccgtctcaataatcactttcaccgtgtgacctttcgcagctttaaccactgcttcaatatcttgttgtacatcatcaaaacgtccatcttttaatgcgccgatgttgataaccatatcaatttcatctgcaccattttgaattgcatcttctgtttcaaatgctttcgttgcagttgtcgatgcacctaatgggaatcctattaccgtacaaacgagcacatctgaatcagctagtcgctctgctacatatttaacatgcgttggattcacacatacagatttaaaatggtatgctttcgcttcatcgatgatttgatcgatttgcgtacgtgttgactcaggcttcagtaaagtgtgatcaatcaattttgcactattcattttctatctcctcctttatggttgattataaaaatacggttgtaaattagttgattgagcgtcaggttcatttaaatatcaggttagatgtccgctttttatgtaaccgcatacatatactattacattaattcatttcccataaacaaacaatacaattgaacatgatatcttcattatgaacgatgacttgccaacaagctaatcaggattatatttttataattctttaattctatagtacaaaaattcgcaaaaaagggaaacaaatgttatcttaaaattattaatgaatattaaggagaagataacaaatgacaaaaggtacaccacatattcaaccaaatggagtaaaaattgctaaaacagtattaatgcctggcgatccgctacgcgcaaaatatattgctgataattttttagaaaatgttgaacaatttaacgatgtacgtaacatgtttggttacactggtacatataaaggtaaagaagtttctgtaatgggttctggtatgggtattccaagtatcggtatttactcatatgagttatacaacttctttgatgtagatacaatcattcgtatcggttcttgtggcgcattacaagaaaatgttaacttatacgatgttattattgcacaagctgcatcaactaattcaaattatgtagatcaatacaatattccaggtcatttcgcgcctatcgctgacttcgaattagtaactaaagctaaaaatgtcgctgaccaaatcggtgctactacgcacgtaggcaacgtattatcttctgatacattttacaatgccgatccaacattcaatgatgcttggaaaaaaatgggtattttaggtatcgaaatggaatcagctggtttatatttaaatgcgattcatgctggtaaaaaagcacttggtattttcacagtaagtgatcatattttacgtgacgaagctactacacctgaagaacgtcaaaattcatttacacaaatgatggaaatcgctttagaaatcgcagaataacttatttaaattgactttaattgctctttaacaatgcgattaaactcaaaaagccaacacattctgggcgtatccccatttatgtgttggcttttatttatattattacttatctgtagattagcttaagtaagatttaaacatccaattatgtttatctactgatgtttgcatacctataaacatatcttctgatacatcatcaccggcatttccagcaatttcaatcgctttttctaattgttttgagatattagtgaaatcttgagataattcttcaaccatttgttctgcagagtaacctttcgcagcttctttaacaattgattgctctaaacattcagttaatgtacctacagggtttcctcctacagctaaaattctttcagctaattcgtctacatattgacttgcttcattatataattcttcaaatttaacgtgtaatgagaagaagttaggtcctttcacataccagtggaaattatgtagctttgtataagctactgtccagtttgctacttgttgattcaattcttttacaacatcttgttgattactcatatttaatacactccttaaaattgtctacgtctttcttgtttatattaattattatattataatgattataatctgtaaagtgtttttactctcttttttataattattctaatttaattgtgaggtgtttcgctttttaaatgcctaaattttaatccatcatctagtatgtctattatcaattaataactatgttttatcaatcagtaagttttactttcgcattatcatctaaaaagaatgatttttcataatcatttggttggtgccatgttgttttccacattctatttctattattagcaaacattcgataaccgaaattacgtactggtttaggtacaagccataaacctacgcccaataatttagttcgattaggtagtgctgtgattagttgaataatcgcctgcgattcaaaatatatacgatcacctttctgtaaaatcacactatttttatttgccgcttctggatgttgtttaaaaaattgttgtccaacttcaccttttaacgtggcaaattgataatttcttggtaggtcatgttgaattaaccaaatgacatagttataacaatatatacagtttccatcataatatacgattggcataatttattcgctccttcaatactacttatagtcatttttcctaatttaaaaacatttaaacaaggttgtcacttaataagtcctcgctacacgaaattgccataaaatttatttttcagttttatatttattgtataatgcattttttatttactttaaatttctcaatctacagtgtaatattatttcttattatcaacttagcgtttagtcgttcgtcttattcaatataccactggaaaactcatataaagttttaatccattaacataaattcatttatattcatatactgtctttattatttattaaaataaaaacgagtaatctatcataagctcttaattagctcttatggttgattacccgtcattttttctttatgcggttattcaaatatgcaattatgcaatttttaatcttatccttacttcttttcaaaaactatcatatatcattagtcatgtttgactttgactatacgtgtgtattttaaaaactgctctgaatatttctccttaatttcctctaaactgtcatatgtaatacctacaatatgccaattaggattgaaataatagaaagaatctttttgtcgtgaccatttaatcatattaccgtctttattataacgtggtaatgttacttcatagccttctaacacattaatatacgtttggaaaatgtctgtatctatacgattaaaattatcaataactaaataacttttatcctttttaggcattaattgagtaataaatccttcacgatagtataatgcccctgtttcatttggtaaatacttgccataaagcatatcttctgaaaaatcaggatgacctgttgttataacaggatttgcattcgctttttgcaataagtcattagccgcttttaagccttcttcttttcgatctacaacaagtaaaataaatggctttaatgcttcttctttttcactttcaagcatatctggtttttgaaccatttcaaatggagatttcaacccattattatcgctcatttcaataattgcatcatactgtgcttgtgacatacttgcaatagcctgttttgcattttcttgtaggaaatataaatttttcaatttaggatgcttatttaatgtacttaatgtaatcggcgtaatgtctttctcataagacacttcaatcactgtactatttgttctaccaggaattggtggtttttcttgaatatgctttgatacttctccaattccaacgacagattgatttttcgttcgattataaaaaataatattgtcgccttcttctaactgagtataaaaatgataaccattacgtttaataccgttgtacgtgtgcgtataaatcgtatattggtttccaggttcaaattcttcagtttcagctaaaaagaaataacgtggtatcttaatttcgcctttaccaagaccacttattaaatcaaactcttctgcagtgatttggttgaacaatgtctctttcatattactcatacgaaattccaaagcttcactacgctttaaataatctgctgttaatggtttcaattgttcattaaaacgaaactgtacacgtattttattttgtgcacctgtttcaacactaattatttcaccacatccaagtagtccagtatccgtctgaacttgataaaagatgacttgatctcctactttagcctttttaaacgctctaaatccttgagatgggttaaaatgtgcgcctgattcaaataaagctgtttgtcctactaacggttcattatgattccaacggttatatccacaattcaaccaaaaataattcgtttctgctgtcatcttaatactccttaacctgaataaattttagaaacactatgaattacattcttttagtgtttcttatgcagttgggcgcgtatgcgatcaactgtatcccctttgttcactgcgattttaatcgcatttcctataacattgtagcgcctaggacattaatttatgtcccagacccttatcgttttcacttctaagtaaatcgaactattttgctttacaacaagtgcgactctatatgcagttggacacacacatacgattaactgtataacttttaatcagttttctatattttatttattatatctgtcttaatgataaaaattgttacaaacagtttaacatatttagctacctattttgcatataaaaaaacatacttacatacattatgcaataaaaactacaaatttatatatgataccactatgcttgcttatctctatagcgccattgatacgcatttttaaaaatctatacgcctttagaattttagcatgtcttaattttcattaaatattaattacttcattttatatacaccaacaaaaaccccctcactactatgcaagtgagaggttatgttgatgtgctttattttcatcaatgtcattaacacaatcatatttctgctgttaatgcactgtactatattcaaacgcgctatcgacaattaatttgaagctacaaaggtaccgcataatggcagcacattaattaacaatgcgctaaactttaatgaggcgctgatttgcttgtctttaaaagtcaacatagcactgataattcctaaaatagccactatacgtggaattgtcatgctcggatactgcggtatatgtacgaaagcaccaagacctgctatcacaccacatactaacgcaatatatagaaattgcttcaaatcattcactcctaaattgttattacactattacacatagctaatcatcaatgtgaaatcaccttcaaagacactatccaaatcttcagaagtcaaaataaagtttgtaccagtagtcagtttgaaaatttcaccatcgacaatcatttgcccttcaccttccaacactgtaactaaacagaactctctaggcttcatataatttaacgtgccagaaatttcccatttaaccaatgtaaagaaatcattcgatacaatgtgtgtacacttatggttttcaataatttcactttcaggcaaaatattaggtaatggtgcattgtactgaataacgtctaaagctttttcaatatttaacggtctatcattatattgattatcttgacgattgaaatcataaagtctatatgtaatgtctgacgattgcatcgtttcgtatgctagtattcctgaagaaatagtatgtactgttcctgctggaataaaatagaattctccaggttttactttaatatatctaagtatcgactctatcgttccgtgttgaacatgattcgcaacttcttctctagactctgctaatgtccctataactatttctgcatcttcttctgcatctataatataccaacattcagatttgccatattgcccattttcatgctcataagcataagaattatcagggtgcacatgaatagaaagtgattctcttgcatccactattttagttagaagcggaaaatctttgcttgggaaatcaccaaacaattcacgatgttctgaccaaatacggtctaatgtttgaccttgatatggtccattaataatctcgctcgtaccatttggatgtgctgacacacaccaacattccccagttgtatcattgtctaattgatatccaaactcacttagacgttgaccgccccataattttgtttttaaaattggttgtaaaaataatggcattgttgcacctccattgtgattaagtaagcaatagaactctgatgttgttgttccattatattttgattttgttctcatttatatcgtattataaacttccacatttcaaattaactattagtgattgtaccatatttactaacattgcagtactgccaattaaagcgcttcacttaaatttacagtactttaacatatgtaaaattttatagcatagagattatatctctcttacatttgtacatatttccctttaaatttactcgcccattataccaattaataaacaactttaatagttgtgccatacattgttcaaattcattgtaaaacgcatagacaatacgtacttattcatacttataattcatcatttttaaaaaaataacgagttacgaaaaagtaacccgcttcaaatcatatttactatccttattaatccgtttcattttcaaattgagttaaagcatctttaatgtcctggtcaccactaataatttgaaactcttggtgattaaaatgattggatgtgacaatttcttttaatactgtcgcaacatcttctctaggaatttcacctttaccttcaaaatattgtgcagcttctatctttccagatcctgctgcatttgtaagtgcccctggatgtaaaattgtataattcaaacctgaacgtcttaaatagtcatcagcgtaatgtttagcaattgtatatggctttaaatcaccgctatcatcaaaagcctgacgtctcgaatcatatgttgaaaccatgacatagtgtttaatattagcctctttactcgcaatcattgatttaacagcaccatctaaatcgacaataattgttttatctgcacctgtgttccctccagaacctactgaaaagataactttatcgaatggtttaaacgtctcagttaaagtctctattgaatcattttcaacatcaacaagaattgctttcataccttgtgattttaacgcattaagttgatcggattgcctaacacctgcagtaaatggtacattttcttttgctaattgttgcactagtaacgaacctacaccgccattagcacctataaccaaaatattcatttacaacactctcctatttattattccctatgccataccactttatgagatatgtaaaacttgttacaactataaaaatcaattgacatactactgggaacgtattaaattaatatatgaacaaatattcatatgaagggattttcatataatgtcagaacaatattcagaaataaatacagatacattagaacgcgtaactgaaattttcaaggcattaggcgattacaatcgaatacgtatcatggaattgttatcagtcagtgaagcaagtgttggtcacatttcacatcaattgaatttatctcaatcaaatgtctcgcaccaattaaaattacttaaaagtgtgcatcttgtgaaagcaaaacgacaaggccaatcaatgatttattcattagatgacatccacgtagcaactatgttaaagcaagccatacatcacgcgaatcatcctaaagaaagtgggttataatatgtctcattcacatcatcatgatcatatgcatagtcatgtaactacaaataataagaaagtattgtttatatcgtttttaataatcggtctatacatgtttatcgaaatcatcggcggtctccttgctaacagcttggcattactatctgatggtatccatatgtttagcgacacattctcattaggtgttgctttaatcgcatttatatatgcagaaaagaacgccacagctacgaaaacatttggttataaacgtttcgaagtactcgcagcgttatttaacggggtaacgctttttgtgataagtattttgattgtttttgaagcaattaaacgattctttgttccttctgaagttcaatcaaaagaaatgttaatcattagcattattggtttaattgtcaatatcgttgttgcattctttatgtttaaaggcggcgacacttcacacaatttaaatatgcgcggtgcttttctacatgttatcggagacttattaggttcagttggcgccattactgcagctattttaatttgggcatttggatggacaatcgccgatcctatcgcaagtattttagtttccgttattattttaaaaagtgcttggggtatcacaaaatcttcaattaacattttaatggaaggcacaccaagtgatgttgatatagatgaagttataactactattaaaaaggattcacgaatacaaagtgtgcatgattgccatgtttggacaatttcaaatgatatgaatgcattaagttgtcatgttgttgtagaccatacattgacaatgaaagaatgtgaattattattagaaaacattgagcatgatttattacatttaaacattcaccatatgactattcaattagaaacgcctaatcacaaacatgatgaatcgattatatgttcaggaacacatagtcattcacataaccatcatgctcatcatcacgcgcatgtacattaataattttaacctactgccattgcatcgattaaacttttcaatggcaataggttttttatgtctttatggcgacttgtttggtctttgttgatgcaatgtttattaacaaattttcaactattatttcttacattagtcatatttttgacaatttactattataattctctaactttagtcactttaattaatttttattagatattaatatgaaaataacgtgttttttgttattgtatttatatgaagaaaaggaggcaccactttgtttacttactttaaatcagcatttaaaaatgctaaaccacaattattaataacattgatatatgcacttatagcatttgctgtaattgcagttgtatatttacttgctaatttccagcttgctaagtatgtacaaactattgcaatttattcacaatttgggcaaaaaccaccaggagatgcatatttaaaagttatcgctgtattacttatagcagctgtagtttcactgtttgttttagctcaaattttcatcggaattacaaatgttatgaaacgagcaatgagtcatgaaaaagtaaaatttaccgatttatttattgcatttaaaaaaggtaattatttaaagagcgttctgatcggccttgtatctgtagcaatgattatcgttctttcacttctgacatcattactatacaaattattttctccagtatcagaaatgattatgaattcagtacaatcatcatatgcagatagtacacacctggttggtattgctattacaactcaaagcatcataatcattgttgttttattgattaaagcaattattacttggttattgttaatacctgttttcaacattatgactagtttcgttgaatcaactaacgataaagtaaaaacacacttagctaatggatttaaagcaatgaaaaatggtcaaaaaacatttttcaaatttttcattggaatactattattaaacttaattattattttatttaaaacacctgttggttacttgatttcatttaatacgcaatcactctctcaaagtgttgcagaaaatatcataagagtttatacagtaatgacaatcattttattcgttgttattcatgcaatcattttaatgggtatcgttcaatattacttaaaacgcggccaaaaaattactaaagataaagtaaaagcagctgacaagaacaaaaaagttgtcactgaaccaaaaaatacaaaagtagaaaatgataaagtgacaacatctgttgaaacaaaaacagaaaaagcacaagattcattaaatgataatactacaaaaacaatgacttcagataaaccagaagacaatcaaccaaaataaattttagagccccttacaactttagttgttaggggctcttatgcatgcgcttagcgcaggcgctcctactcttaaactttagttgttaggggctcttatgcagttgatgcgtagcatccaactgtgttcctctatttttaatacagctatagttgatgtcatatgatattttaatattagtttaaacttatatccactcaacataaaaaggagaggtaaagatgacatatggttcaatcatcgctatcgcttgtgcactatttgtaatcttctttataccgtatatggaaaagaacaataaaaagaagaaataacacaagcgtctggatttctagtatacaagaggctggcacataaatccgtaaaaaacagcagtaagatattttttaatcagaaaatatcttactgctgttttgtatattgctcatcaactattttaaattaattattaaaacaccaattaatcagctaaaaaatgctttgctaaatattttgctgcgccatcctcttcattcgtatatgccgttacatctgaagttaatgcttggatttcagggcgtgcatttttcattgcgactgtgtaatgtccaaattcaaacattgctctatcattgtcgctatctccaataactaacgtttcttcttgattgatgccaaaatgttcaatcatttctttaatgcctgtacctttatcagtttgataagccattgtttccgcattaaatcttgatgaatttgaaacactaatctgtagttgcacatgattttgctttaattcatttctaaatgctgttattttttctaaattcgaactgaatagataaatttttgaatattcaccttcaggaaacttagttacccaatctatcttaccagcaagcgcatcttgtcttgaagaccattcactatgacttacgccattaataggatcttgactacgaatcatatctcgcatccatgtttcatcttcttttaaagaaactctattaccttcaaaaggaaatacctcataataaatttgttggcgcttagctaaattaataatttgttgcacttgagccaatgataaaccatgtttgaagataatttctccatctacttctccaatggttccatttgaactaatgatgccatttaccgcaaaatcttgtggtacaagttgatgtatttcagaatgcgaacgtccagtcgccaaaaatactttatatcctttctctatcaatcgattaatgacatctttcgtatacgttgatgcttgattattttcatgtaaaattgtaccatccatatccaaaaatattgcttttacgttatccatattgccctccactgtcaattttagcttaattaaattttgtcattattagttagtatttgcaaaatatttactctaacatcgccatagaaaatcgattattccacctttgaactgctacttttttccggaagaaataagacatgttttcagatgtcaaaatatcatctattaatccttgttgtacactttccccatcttttaataacaaaattttagtaaagttaccagtaatttcttcaataaagtgcgtcacataaatcatcgcaagcgttggatatgaatctgacaatgagtcaagtatacttaacaacgattctcgtgcaataaagtctaaaccagctgctggctcatctaaaattaaaacctggggttgccccattaaagctcgcgcaatcatcactcgttgtttttcacctgtagataaataaccaatatattgttgcgctttagcagacattccaactaatttaagtaattgatgtgcttcattacgtaccttatcatcaatatcttgataaacaccaattgatttaaaagcaccgcttatcaccacatcgattactctttcaccctcttgaaacttttccagtaaactatgagatacaaaacctatatgttgtcgtacagtctctgcagaataccctaccttgcctggcattttaccaaatagattaacaccgccagttgtcgcaggttcatacgcatttaatatatttaatagcgttgtcttaccagcaccattcaatccatataatatccatttgtcacctttagcaatttgccaagaaatattttttaaaattgtttttccttgcttcattcgcccaacttgttctaattgaattaacatgcgaggtcacccctttattgctactccatacttctcataaaatcatattaacataccactcttaattgtcagactatttaaataaataaactgcttcatttttgcattttactgccgaattaagatgaagtaaaagctaaatcgacctaaaaaagcacccttctagtcgattaatctaaaagggtgccatatactttaattttaatgcatgcttgtttcaaaaagcagtgaattattctacagtgactgatttagcaaggttacgtggtttatctacatctaaatctctgtgcaatgctgcataatatgaaattaattgtaatgcaactacagacactaatggtgttaataattcatgtacatgtggaatgacataagtgtcgccttctttttcaagaccttccatagaaatgatacatgggtgcgcaccacgtgctactacctctttaacgttaccacgaattgataaattaactttctcttgcgttgctaaacctacaactggtgtaccttcttcgattaaggcaattgtaccgtgtttaagttcgccacctgcaaaaccttcagcttgaatgtaagagatttctttaagttttaacgcaccttctaaacttacgttatagtcaatagtacgtccgataaagaatgcattgcgtgttgtttctaagaaatctgtcgcaatttgttccataattggtgcatcgtcaacaatcgcttcaattgctgttgttacttttgctaattctctcaataaatcaatatctgcttcacgaccgtgctcttttgcaacgatttgagacaagattgataatactgcaatttgtgcagtatatgcttttgtagatgcaactgcgatttcaggacccgcgtgtaataacaatgtgtggtctgcttcacgtgataaagttgaacctgcaacattagtgattgttaatgatttatgacctaatttattagtttcaactaatactgcacggctatctgcagtttcacctgattgagaaatatatacaaatagtggtttttcagataataatggcatgttatatacaaactcagatgcaacatatacttcagttggtacaccagcccatttttctaaaaattctttacctactaaacctgcatggtagcttgtacctgctgcaataacgtaaatgcggtctgcttctttaacatcattgatgatgtcttgatcaattttcaagttaccttctgcatcttgatattcttgaataatacgacgcattactgctggttgttcatgaatttcttttaacatgtagtgtgcataaacacctttttcagcatctgatgcatcaatttcagcaatatatgaatcacgttctacaacgtttccatctgcatctttaataataacttcatcttttttaacaataacgatttcatggtcatggatttctttatattcgcttgtcacttgtaacattgcaagtgcatctgatgcgataacattgaaaccttcaccaacacctaataataatggtgatttatttttagcaacatagattgtgtctttgtcttcagcatctaataaacctaatgcatatgaaccatgtaataatgacacaacttttgtaaatgcttcttcagttgaaagtccttgatttgaaaagtattcaactaattgaacgataacttctgtatctgtttctgaaatgaatgatacaccttgtaagtattcaccttttaactcttcatagttttcaataacaccgttatgaactagagtaaaacggccatttgatgattgatgtggatgagagttttcatgattcggtacaccgtgtgttgcccaacgtgtgtgaccgattccaacaggtccatcaaaatcgctactatcagcaactttacgtaattctgcaatacgacctttttctttaaatacagttgtattatcatcatttactactgcgatacctgcagagtcataacctctgtattctaatttttctaaaccttttaataataattctttggcattatcatagccaatataaccaacaattccacacataacgacattttcctccatattggaatagtacgcgtaaattatgatttattgccgataatttagattgacaatctgctttcataatataaataggaacatgctatcatcgcattcatccataacaaattaagcatagttatttttacaactatacaaattgctcacactgtactttccatattaatattttttatattcaatttctggcgatcttattaactttgtccattaagtcaccctaatgttttacttaataagctaacgaatgagccacatccgggatagcatccgccgatctattcgatcactatcctcctcgtctacaaatacatatattgcactctataaaggccactcatatattaacctttaatcttcaaatacaaatatttatttgcacaggcgctttaactgtactgccgaactttccccctttccattaatcattattgtacaacggtgttgttttgttttgcaaatattttcacaataaaactttaaaaatcctaaaacaatttttttgttttactttttcaaaatatctataccgtcacatttatgacactttatttaattttgtcacatttattttgacaaagttgatttttgtttatattgagtaaaaagtaacggctctatacactatatatagtcacatatattaaaaaagaggtgtaaatatgtcacaaactgaagagaaaaaaggtataggacgtcgtgttcaagcatttggctcattcttaagtagtatgattatgccaaacattggggctttcatcgcttggggttttatcgcggccatttttatagataatggttggttacctaataaagatttagctactttagctggaccaatgattacgtacttaatcccattattaatcgcatttagtggtggtcgtttaatttatgatttacgtggtggtatcatcgcagcaacggcaactatgggggtcatcgttgcattacctgatacaccaatgttacttggcgctatgattatgggtccacttgttggttggttaatgaaaaagacagaccaattgatccaacctagaacaccacaaggttttgaaatgctatttaataatttttcagctggtattttaggatttatcatgacaattgcaggatttaaaattttagcaccacttatgaaatttattatgcatattttatcagtggcagttgaagcattagtacatgctcacctacttccacttgtaagtattttagtagaacctgcaaaaattgtatttttaaacaatgcgattaaccatggtgtattcacaccacttggtgcagatcaagctgcaaaagctggtcaatctattttatacacaattgaatctaaccctggaccaggtttaggaattttacttgcttatatgatttttgggaaaggtactgcaaaagcaacgtcatatggtgctggaattatccacttcttcggtggtattcatgaaatttatttcccatatgtattaatgcgtcctttattattcatcgctgttattttaggcggaatgactggtgttgcaacttatcaagcaacaggatttggatttaaaagtccagcgtcaccaggttcatttattgtttactgtttaaatgcacctagaggtgagttcttgcacatgttactcggtgtattccttgctgcacttgtatcatttgtcgtagcagctttaattatgaagttcactaaagaacctaaacaagatttagaagctgcaactgctcaaatggaaactactaaaggtaaaaaatctagtgttgcatctaagttagtatcttctgataaagatgcagaagttgaagcgaatgcaagtactgaagcaaaaacgaatgcggatgtaacatctacattagaggatgatcctgaagcattattggataattacaatactgaagatgttgatgcacacaattacaataatatagaccatgttatatttgcctgcgatgcgggtatgggttctagtgcaatgggtgcaagtatgttacgcaacaaattcaaaaaagcaggcattaatgatattactgtaacaaatactgcgattaatcaattgccaaaagatgctcaattagttatcactcagaaaaaactaactgatcgtgctattaaacaaacaccaaatgccatccatatatcagtggataatttccttaattcaccaagatatgaagaacttttaaataatctaaaaaaagatgatcaagcataataattaaataaattaaaaaatggaggataccgccatgttattgagtacacgtgaaaaagaaatgatagccctattgattaagtaccacggtcaatatatcactatacacgacattgctcagcaacttgcggtgtcctctcgtactattcaccgtgaattaaaaggtgttgaagcatatttaacttcattttcattaactttagaacgcgcaaacaaaaaagggctacgcattgctggcgaagagtctgatttaaacgatttgaagcaatcaatcgcaaaacatcaaaccattgacttatctgttgaagagcagaaagtaattattatatacgctttgatacaagccaaggagccagttaaacaatatagtttagcgcaagaaattggcgtttctgtccagactttagcaaagatgttagatgatttagagctcgatttaaataagtaccaactatctttatctcgaaagcgtggcgaaggtatttacttggtaggtactgaatcaaagaaacgtgaatttttaagtcaattaatggtgaataacttaaatagtactagcgtttattcagtaatagaaaatcattttgtctttcattcattaaatcaaatccacaaagactttgttgacttagagcgtatttttaatgttgaaagactattaatggactacctaagtgccttaccctaccaacttaccgaatcaagttatttaactttaactgtccatatcgtgctatccatttcacgtataaaaaatggagagtatgtcgcattaaacgacgatatttatgattctgtacaaaacacatttgaacacaaagtagcaagcgaacttgctgataaacttggtcaaatatatgacgtcacgtttaatcaggcagaaattgctttcattactatccatttacgtggagctaaacgaaaaaatcttaatgatacatcagtaaataatcgttgtgaagagaacaaaattaaagcgtttgttaaaaaagtagaaatgatttcaggtatgacatttgcagatttggatactttagttgatggactgacgctacaccttaatcctgcaatcaatcgtttgcaagctaatatcgagacctataatccgttaacagacatgattaagttcaaatatccaagactatttgaaaatgtaagattagctttaaatgatagttggcctgatttgatttttccagagagtgaaattgcttttatagttttacactttggtggctcgattaaaaaccaaggtaatcgttttttaaacatattagtcgtttgcagcagtggtatgggaactagccgtctattatcaactcgtctagagcaagtttttagtgagattgagtgtattacacaagcatcagtcagcgatttgaagtcactagatttaagtcaatatgatggcattatttctactgtgaatttagacatcgactccccctatttaacggtaaacccattattaccagatagtgatatcagttatgtcgcacagtttttaaatacaaagtctacgttccaagagacgcatgatcaatcatcaaacatgattgataagaatgatgttcatgttgaaacgaaagatattgatggcaacacatcttttgaaaatgaacaaacttcatacttaacttcaattttcgaaaaacatttaagtgacgaaaaatcagaacaattaatgcatcatatgcgttcgggtttaactttgcttgattcagtgaaaatagttagtaccgaagttaaacagtggcaaacatatatcgcagattatctatatcaatccgatgtaataaacgatccaacgtcattcgctgaactactagagcaacgattgattgacaatcctggatggatattaagtccatatcctgttgcaataccacatctaagagacaatatgattaaacaccctatgattctaatcacagttttagaagaaccgttaacattgcctagtattcaaaatgacaatcaaacaattaaatatatgatttccatgtttattcctgacaatgattttatggcatcactggtaagtgacttgtccgaatttttaagtttgaaattagaatctattgatacttttatggaaaatccacaggaacttgaaacattattaagaaacaaatttttagaacgaattaaaaaacaatttatttaggagtgtacaaaatgagcgaattatttagtaatgacaatatctttttaaatgtaaatgttaacagccaaaatgaagcaattgaacaagcaggtaaagccttagttgatagtggtgctgtaacagatgcttatattcaagcaatgaaagatcgtgagcaagtcgtatcaacatttatgggaaatggcttagcaattcctcatggcacagatgaagctaaaacaaatgtgattcactcaggtttaacattattacaaatccctgaaggcgttgactgggatggcgaagtagttaaagttgtcgtgggaatcgctggtaaagatggcgaacatttagacttgttatctaaaattgcaataacatttagcgaagaagaaaatgtcgatcgtatcgttcaagcaaaatctgcagaagaaattaaacaagtattcgaggaggcagatgcataatgaaagcagttcactttggtgctggtaacataggtcgtggtttcattggttatattcttgcagacaacaatgttaaagtaacatttgcagacgtcaatgaagaaatcattaatgctttagctcatgatcatcaatacgatgttattttagctgatgagtctaaaacaacgacgcgtgtgaataatgttgatgcaattaattcaatgcaaccttctgaagcgttgaaacaagcaattctagaagctgatattattacaacagctgttggtgttaacatactacctattattgctaaatcttttgcgcctttcttaaaagaaaaaacaaaccatgttaatattgttgcttgtgagaatgctattatggcaactgatacattgaaaaaagcggtacttgatattactggccctcttggtaacaatattcattttgctaactcagcagttgatagaattgtaccattacaaaagaatgaaaatatattagacgttatggttgagccattttacgaatgggttgttgaaaaagatgcatggtatggcccagaactaaatcatattaaatatgttgatgatttaacaccatatattgagcgtaaattattaactgtgaatacaggacatgcatatttagcgtatgctggtaaatttgcaggtaaagctaccgtattagacgctgtaaaagatagttcaattgaagctggcttacgccgtgttttagctgaaacaagtcaatatattactaatgaatttgattttactgaagcggaacaagctggttatgtcgaaaaaataatagaccgtttcaacaattcttatttatctgatgaagtaacacgtgtcggacgaggtacgttacgtaaaattggccctaaagatagaattataaagccattaacatatctttataataaagatttagaacgcactggtttattaaatacagctgcattgttattaaagtatgatgatacagcagaccaagaaactgttgagaaaaataattacattaaagaacacgatttaaaagcgttcttaagcgaatatgctaaagttgacgatggcttagccgatgaaataatcgaagcgtacaattcactttcataatttattgagctttgtttgaaacaagaagtttccaacgttatgcgttaacaatcagtaataatgtagtagttccgttgaattaacaatattacatttctgaacataaaaaatactcccttcaacatagacacttaacttgtgttatgtatgaaaggagtatttttgcgttaatgatttgtttgttttactttcgagccacagccaccttttcaatggctattggtcattactaaaacaaattcatattaactgttagacttggttacttagtaaggaatatttcccaatgaaataactagatgttcacattcttaaataaattttattcttcagtttgttggtctttcttagtgaatcttctaattaagaatgccatacctgcacctagagctaattcagcatatggtaaatcatcattatgtgacataccagtatctggtaaagttttagcttgttgttttgctttattttctttaccttgttgcgctgatgttgccttagcttcgtgtttgtcagtgttagttactttaagcatatcatgatgcatactatgactaccattagaaactgttactggagatgcattggcaccgtcgttttgcgtagctttattgtttacatctgcagttgcaccaattgctgcttgattatcttttgtatctgctgttgccatgtcagctttttgactatcctcagtcgaagtcgctttatcttttgtttctgaagatgcagatgttgatggtttattcgaaactgcagtatcagctttgcttggcgatttatctgcttcattagatgcaacgttagtttcagacttaagttgtcctgcatcagtttgatttgacgtactttcctctttatcttttgatgtattagaaggtacatttggttctgttatgtctgctgaaggcaatgtttcagttgttgattcgaccatactttgatttgttgaatctctaccatctttttctaccttagctttattttcagattttggttgtgcaaccttgccattaattggttgagattcagcactattatttacttcagcattttgatttgaagcatttacagatgcattatcttttctatcagcagttgatgttgtttctgtgctctcagtagttgctggtttatcagttgtgccgttattagttagttctactgctggtttatcagttgtaccattacccgttgccgaattgtctgttgatgcatctacactagaattgttattagctgtcggtttatcatttgcatcatcagttgatgaattgtttgttgatgttcctgttgtttcacctgttgctgaatcattatgattatttgtcgttgttgaagacgtatctgcattggcattatctgttgactcagttacattaggttgtccagtattttctggtgttgcattagtatttgaatttgctgttgcatcattattatctgaaccactattagtatcattagcatttggatccttctgaggtacaatcgcttcaattgcaggtatcgttacattttgtaattcatcaacttctgcatttgtttgtgttttatctaatttatcagcaaatctgtcaaaatatctacctaaatccgtacgtgcaatttctttcgccgatgcatctgcatctgcatttttaattatttctatttgcttgttaaccacttctctaattgcttccaaagcatttttcttaacttctggattaatacgttgtgctttaagttgttcaagcgcactatttttgacagtagcgatttctgcatttgtagtttgatcagaaatatcttcagttgcttttgataaaatgtcttctaaagcattcgtaaacgcttctttttcttcagttgtagcatcagagtcgacatttacacctgcttcaatctggtctagtgcagtttctaattcttcgatagctttttgtttttctgttgagtcaatttgaatgttatcaaacgcctcaagtccttgagctttcgctttttcaacttcggcagttgttgctgcatcagtaatgccttgtttagcttgatctgtaatttgtttaatcgttgctaatgcttcagttttttcttcagcagttaactggtcactttgatcaatagattctttcgtttcctctgctttagcttcaatagcttggttcgctttaggtttaacagaagcgtcaacttgaactgcatcaatagtcgctttaccttgtgttaatgcatcatcaacgtcaccattatccacaccattattaatgctttctaatgcagtttgaacattttggtcaacttgcttgattgcttgttgtttttcatcttgtgttgcaatagtgtcagctgaaatattatttttcttctgatctgcataggcatataaatctgttgtagctgattcttttttacctgttggaattgtgtaatcgttaatattatctaagtcattatgaatttgtacctctatgtcatctttagaagtagcttgattaacgttttgatccgcagtttgtttcaattcagcaagtttttgtttcgcttcagcaatttcacttgaagtcgatgcattagagttatccgcttcgtttactttagcattatatgcatctgcaattttagctaaagcatcttttttatactcactaaatgttttaactgcattaattttagcttttccatctctaaccgctgcatctacatagtcatcagtcgaagattgatcaatatttgttttcgcttgatttaatactgtatcaacttcttgttttgcatcattaatttcttgttgtgacgcatttggcgtttgttcaatttgtgttttcttatcagctgcagcttgatctaatgcagttttacctgaaggcttcttaacaggatttgcatgaagttgttgaactttttgtactgctgcgtctttagcagttgttacatcacctgttgtagttgatgtattaatattatttaaaccttcttcatatgctgctctaactggccctatatctttacctttttcttcattggtagtcgtattatcattaaggatttcagttattttattttgcatttcatttaacaattcagctcttgcattcgttttaacatctgttgatgcttgaattgggtcgatggcttgaattgcattatcttttgcagtgtttacgtcatcaattgactgtgcattttcaatattttgatttccttgtgttaattgtgcgtctacttgttgatttgcttgttctttttcttcagtagtcgcatctgcagtttgtgcaataagcgctttttgttcatttgcttttgctgttagttcacctttagcaacatctttaattgtcgtatcggcagtaataccttgaatgtcagtaactgcttgatctttaatttgcgtaacatcgttagtcgtttgcgcatttaaaatatcttgatatgctttttctttagcttttaaaactaaatcttttgctgcatttttctcttcagttgtagcatcagttgtattatcaatagcttgattttgagttgtcacagcttgatcaacatcatttttagcatttgatttaactgctgttgctggttgtgtactttgaatcgaatttttacctgcatctttcgccgtgtctaccccattattgtcagttgcagctgtaatgttatttttcgcgtctgtaactgctgttgctagttgttgaatcgccgcttctttttcttcatttgttgcattttgatcgttattaataatcgctgtttgtactgcttgtaattgatcgatctcatctttcgctgcttgtttcttcataacttttggtgttacagcgttaattgccacttctgcattcgcttttgcatcatctacttctgcatttgttgttgctgctgtgatggcgtgatttgctttagcattttctgtattagcttcaagatctgcttcttgtttttcttcatctgttgcatccggtgtagcttgaatctcttgcaacttgttgtttaatgcagtagtgatttcattacgcgctgttgcttttttattaacagttggtgtcacttgatcaatactagattcacctgttgtcttcgcttgatcaacttcattttgactattagcagcttcaatatggctatttgcttctgtcacagcattatctacattcgcattagccgcttcaatttcttctgctgtaatgtcttgcgtttgagcaatggctgctttacgttcattcgctttcgtagctatggcttgtttcgcatcatctttcgttgttgtcgctggttgaattgcttcaattttagcaatttctgcatttttagccgcttctacttctgcatttgaatgtgcaccatctattgctgcatcagctgtcgttttttctgtttgaacttgttgtttcgcagcatttttttcttctgttgttgcaccgttattagcatcaattgctgtttcttgtgcttgtactttatctgcaattgcttgtttcgctgttgatttaacatttgcatctggcgtaatggctgcaattgtagcttcatttgtagcttttgcattatccacatctgtatttgctgcggcattatcaatgtcagcgtttgcagtaactactgcttgatcaactttgtctttagctgcttgttgttcttcagtagtcgaatcattcattgcttcgattgctgttttacgttcacttgctttttgagcgatttccgcttttgcatccgatttcttagttgtggcagcttgaacttgattaattgcagcaataccattgtctttagctgttgttacagcactgtttgtatttgcagcatcaagattcgttcttgcctcttgttttttagcatctaattgcgtatatgccgcttctttttcttctgttgttgaagcgttactattttggatttcttgtttacgtgtattatatgcgttgtctacttccctatccgctgcaggtttaactcttgcttgtgtttgaatggcattgattttatctaatacttttgctttagtatcagccacttcttgttgagatttaacaacttggatgtcatgtaaaccttctgtttgagctgcatctactgctgcatttgcctctgctacttcttcatcagttgcatttgaaactgttgcattttgagcttttctagctgtagcagtttgtttaacttctttataggcatccattttagtttgagttgagtccgtaatattctcaattttgaatatttcctcgtttttaacgcgttctaactcttgtgcagtcgttgtcgcttctatcgctttaacacctgaaactttagctttattaatacgttcaatggcctccgctacttcttcatttgttgtatcaggatttaaaggtgcttgatcaatttgtgcttgaacaacttcgtcaaattcttcaagagctgctgctttagctgttgtagcaggtgcagtttgattaatatcattgattgcttttgttttaatggcttctacttgtgcatttgtagttgctgcatcaatatcttttattgcctttgtttcaattttaccaattttatcatttgctacatctttttcatcttgtaatgatgcatttgactttttaatttgttgtttgcgtgtcgtaacagcttgaataatatcttgtttcgcttgtggtttaacagttggtgtaattacatcttgttctaacactgcgataccattatctttttcagttgtaacaccttgcgctgttatttgtttattaatttctgcgattgcattatttttatcattgttaattttagttacaagtgctgccacttcatcttgcgtaacttttttactttgttgtgctgctgtaaccttttcttgtgctttagcatctaattcagcaattgctgcttgattatcaattaatgcagcttgtaattttgttactaaaccgtcaatatccgcttgagatgcacgatttgcagtttcaacatgattcgcatcttcatttaaaatagtgtctgcttgttgtttaagtttattgtattctgcaattgatgctgttgtgtaatgactatcatcaacttgtgagttaacttgttgttgcaacgcatctttgttcatttcaaccgctactgaaaatggatctgcagttagggtaacttctggttgcgcattattaattacaacatctgaagcagtacgatatgttaatttttcattaaaatcaatatttttaggtgtatcaatattcgcaacattaactttatatgataattttaaagatttatctgggaataaaacttctttcgtatgtgtaccacgtgctgttgtcacaccttggcttgtaaatgtaactttatttgcattttgatcataattgacagtcatatttttcaatactgtactgtcttcattaccattagggaatgttgtagttaatgaatcattaacgtaagttacaccttgtggtaatgttacttcatatttaaattgatctgcttttaatgaagcgccaaaattaccattgttaccgatttcagtattaatagtatattctttattgttagttgctttcggtgctaaatctctatttttgacatataaatgagaacctgagaatagacctacattatcaatgaatgaatagtatttataaccatctttatttgttgtaattcttgaagcatcagcaactgctgtattgtcaggaataaattgtaaatctaaacgatcagcatctgttggtactttaaataaatgtgcagtaccagtcttagctacatttacagttgctaattcagtatttttcttagcatctttaataactaaatttgttgcaccttgcttactattcgtttgcatagtagtaaagttaataattaattctgaatctggttttacatttacagtttttgaaataccgttaaagttaccatgatctgtagaatcatttgcattcacacgacctaatgcagctacattccctctagcttggtagttttgagggttattcttatcaaacatatcgcttcgtcttaattcggagttaacgaaaccaatcttaccattgttaattaatgaataaccatttacatgatctgtaaccgttacagttggatcctgtctgttatcgtttgttgaaatggcagggtcatcaaacgttaatgttgtattaatactgccttcacctgtattattagcatttggatcttgtggttgtgcatttgctgctacaggtgcagctggttgcgctgctgctggagcatttgctggctgtgtttgatttgcaggcgctgcattattaggtgttgcttggttatttccttgacctgcttggtttgctggtgcagcttgatttccaggttgtgcttgtacagcgttattcggatcagcttgattaccttgtccagctggttgtgttgttcctgctgctggttgtgttgttcctgctgctggttgtgttgttcctgctgccggagtggcctgtccaccttgatttgctgctgggtctgcttgaccgccttgatttgcaggtgcagctggctgtgctgtaggattagcttgagcaccagcatttgcgttaggctgtgcactggcatcagctggttgtgctggttgattttgtgcaggctgattttgctctgctgcagacgctgttgtcgggttaatagatataaatgtaacagtggcaattaaagctgaaaaaataccgacattaaattttctgatactaaatttttgttgtctgaataaattcattaagtcatcttcctggttgattattctcgctgttaaatgatgtcacttaatcaacttttaagataaacagtttgcttccatcttataaaaggtagagcaactctatctaattaaaattaattttatcatcattatatattgcttaccagtgaattttatattacatattgattactttgtttttatgtgttctttattattttgtctttacgaaataatattcttgctttagtcaaattaaaaaaaccgatgcataagcatcggtttgatttatatcttgaaattatttatctaatcccattttatcttgaaccacatcagctatttgttgtgcaaatctttcagcatcttcatcagttgctgcttcaaccatgacacgaactaatggttctgttccagaaggtcttactaaaattcgaccttctccattcatttctacttctactttagtcataacttctttaacgtcaacattttcttcaacacgatatttatctgttacgcgtacgttaattaatgattgtggatattttttcatttgtccagctaattcacttagtgatttaccagtcatttttattactgaagctaattgaataccagttaataaaccatcaccagttgtattgtaatccatcataacgatatgtccagattgttctccacctaagttataattaccgcgacgcatttcttctactacatatctgtcgccaactttagttttattagatttaattccttcttgttcaagcgctttgtaaaaacctaagttactcataacagtagaaacaatcatgtcattattcaattcttgatttttatgcatttcttgaccaataataaacataatttggtcaccgtcaacgatttgaccattctcatctactgctatgattctgtctccatcgccgtcaaatgctagcccaaaatcactttcagtttcaacaactttttctgctaatttttcaggatgtgtagagccacatttctcattgatattatatccatcaggactacatccaattgtttcagtatctgcctctaaatcaccaaataagaatggcgctagtgatgatgttgaaccatttgcaccatctaaaacaattttcaaaccttcaaagttaacatctactgttgattttaaatagctcaaatatttttgtgccccttcaaagtaatctgaataatgtacaatatcattgccaactggtcttggtaattctgggttttcttgatccaataatgcttcaatttcattttcttgttcatctgatagtttaaaaccatctgatccaaagaatttaataccattatctgcaactggattatgagaggctgatatcattacacctaactctgcacccatatcgcgtgttaaatatgcaacacctggtgttgaaataatacctaatcgcatcacttctgcaccaattgaaatcaaaccagctattaatgctgactctaacatttcacctgaaactctagtatcgcgtcctacaagtacacgtgggtgtttttcacctttattatgtgctagaacatagccaccgtatcttcctaatttaaatgccaattctggtgttaattcttggtttgcgacacctcttactccgtctgtaccaaaatattttcccattgtttactctcctttaatttagctatttattttacattgatataagcttttgtttcacttggttctgctttagtgacatgttcaggcagattgattttcacagtcttttcagttgattctgaaataccatctaaatctacttctgcatcaacttcgcctatattttgtaagtcatctcgactaccgaagatttcaatttctttatcttctaattcaatggaacttaattctttatcatctgctaaactacctttctgtttaacatttactttaacctttttgctaaaaggctctactttaacttgtaaattcacttcattaggttgaatcgatacatttaatttattcagttttttatcaaaagccgttacttctgcgatatcttttgtgtcaccattaatctttttattagttttaaaagtggcttttaaataagcgatatcatttaattgttcttctccacctgttactttaactgtttgtggtgaaacttcttgctttgtaattttataaagtggatcaatatcactctgacttacatcaggttgaactgtcatctttttagttactttgttttcaagcgtaatatttgctaatttaggttttacagaataatgaatgtcatcagctaaccctttaacttgatacttctcttgatactttccagctttagcatttgataaatcaatcactactcttaaatcttctggattttcaatttttattatctttgattgtggtcctgaaatagtcacattaactgtttcaggcgcttttgttaaatgcaaatctttagtgttataaagaatttcaacgggtacatcttgaatcgttttactagacttttgaccaagattaccagtgttaaagatatttccaaaaacattgttaacagataaaaagaaaaacaatgccaaaagaaaggcaataaatcttaagccccatttactttctagcatattatttcacacctttcttttgaaagcgtgtgccaaaccaatgttcagcaagcaactcttcaaaaatttcgtttgaaatgtctcggcgtaattttccatcaaatgttaccgaaatatcaccagtttcttcagatacaataacggtaaatgcatcagatacttctgaaataccaaccgctgctctatgtcttgtacccaaacttttagatatcttaggactatcagacaatggcaaataacttgctgctgctgcaatcttcgtgccttgaataatcattgcaccatcatgtaaaggtgtattaggtataaagacattaattaaaagttcttgtgaaatatttgaatccattgcaatacctgtttcaatataatcttgaagacctgtttctttttcaaagacaattaatgcacctatacgtcttttagccatatattgcacagcctttgaaaccgattgaatcagtttctcttcatctttactatacgtattagatgtatagcgttttaaaaagctacctctaccaagttgttctaacgcacgtctaatttctggttggaatattactattaaagctaataccccccattgaataacgatatcaaataatttagatgttgcagtcaagttcaatatcatacttatctgctgaccaataacaattactaatatccctttaagtaattgtatcgctttagttcccttaaagaccgtgatgagaagataaagtacataccaaactatcagtaaatcaaggatactcgttacaatttttaacgtactgaggttttgaaaaaagttggaaaaatccataacatctcctccgggtaatatttttccataatacccattataccaatcatttacatcactgtcatacgaacatatatttaaatagaaaaaatttattttaaagattataactactcttaatcattttagtgaattaaaaaagtagtgcaaaaagcaaaatatactttatacactacaaatcatttatttataataaagtttcaccaaaaaatgttccaattaatgaaactgcctgctcagcagtatggttgttatgatcaataagtggattcacttcaactaagtccattgaagtaactgactgagactgatgtaataattccagcgcaaaatgactttctctatatgtaagtccgcctaagactctagtacctgtgcctggcgtttcaagtggatctaaggcatcaacatctaaagataaatgaacgccatcaacattgcgtgacttcaaatattctattgtattttcaattacttcctttatccccaatttatcaatatctgacatagtaaatgttttaatattatgatctttgataaattgtctttcacctttatctaaatctctcataccaattagtacgatgttttctggcttgattacattactatttaattctaaaagttctttaggaccttcacctgtcaaaatccttagaggcataccgtgaatatttccacttggtgactcttcaggtatatttaaatcaccatgtgcatcataccaaataacacctaaattattataatgtttacttattgctgatactgaacctaccgcaatagaatgatctccaccaagaactagaggaaatctgttattttcaattgatgctgatacttctttatttaatttttgagtaacatctataatttcatcgtagtttcttaatcctttttgttcactttgaaatttttcaatgtctacaactgataccttaatatcccctttgtcattaacatcaaggtctaattgctttagtcttggtattaaacctgcatatctaatcgcagttggtcctaaatcaacacctaattttctttgtccaaatgttgacggtacaccaataatatcaattccttttttctttgtcataagcgtccccctttgttatacataatttcagaataatgtataagcttactataatcaagtaatagccataacataacgccttagcattctaattctcaaaaaatgaaaaaagcacttcccaagaatggaaagtgcaagtagtgagccatagaggattcgaacctctgaccctctgattaaaagtcagatgctctaccaactgagctaatggctctaatggctgggctagctggattcgaaccaacgagtgacggagtcaaagtccgttgccttaccgcttggctatagcccaatatatagatggtggaggggggcagattcgaactgccgaacccgaaggagcggatttacagtccgccgcgtttagccacttcgctacccctccagcttattcagttaattaataatcaaaatggtggagaatgacgggttcgaaccgccgaccctctgcttgtaaggcagatgctctcccagctgagctaattctccaatataatgactcctacgggactcgaacccgtgttaccgccgtgaaagggcggtgtcttaaccgcttgaccaaggagccatggctccacaggtaggactcgaacctacgaccgatcggttaacagccgatagctctaccactgagctactgtggattaatattaatgcctggcaacgttctactctagcggaacgtaagttcgactaccatcgacgctaaggagcttaacttctgtgttcggcatgggaacaggtgtgacctccttgctatagtcaccagacatatgaatgtagattatacattcaaaactagatagtaagtaaaagtgattttgcttcgcaaaacatttaaatttgattaagtcttcgatcgattagtattcgtcagctccacatgtcaccatgcttccacctcgaacctattaacctcatcatctttgagggatcttataaccgaagttgggaaatctcatcttgaggggggcttcatgcttagatgctttcagcacttatcccgtccacacatagctacccagctatgccgttggcacgacaactggtacaccagaggtatgtccatcccggtcctctcgtactaaggacagctcctctcaaatttcctacgcccacgacggatagggaccgaactgtctcacgacgttctgaacccagctcgcgtaccgctttaatgggcgaacagcccaacccttgggaccgactacagccccaggatgcgatgagccgacatcgaggtgccaaacctccccgtcgatgtgaactcttgggggagataagcctgttatccccggggtagcttttatccgttgagcgatggcccttccatgcggaaccaccggatcactaagtccgtctttcgaccctgctcgacttgtaggtctcgcagtcaagctcccttatgcctttacactctatgaatgatttccaaccattctgagggaacctttgagcgcctccgttaccttttaggaggcgaccgccccagtcaaactgcccgcctgacactgtctcccaccacgataagtggtgcgggttagaaagccaacacagctagggtagtatcccaccagcgcctccacgtaagctagcgctcacgtttcaaaggctcctacctatcctgtacaagctgtgccgaatttcaatatcaggctacagtaaagctccacggggtctttccgtcctgtcgcgggtaacctgcatcttcacaggtactatgatttcaccgagtctctcgttgagacagtgcccaaatcgttacgcctttcgtgcgggtcggaacttacccgacaaggaatttcgctaccttaggaccgttatagttacggccgccgtttactggggcttcgattcgtagcttcgcagaagctaaccactcctcttaaccttccagcaccgggcaggcgtcagcccctatacatcaccttacggtttagcagagacctgtgtttttgataaacagtcgcttgggcctattcactgcggctcttctgggcgttaaccctaaagagcaccccttctcccgaagttacggggtcattttgccgagttccttaacgagagttcgctcgctcaccttagaattctcatcttgactacctgtgtcggtttgcggtacgggcacctattttctatctagaggcttttctcggcagtgtgaaatcaacgactcgaagacacaatgtcttctccccatcacagctcagccttaacgagtaccggatttgcctaatactcagccttactgcttagacgtgcaatccaatcgcacgcttcgcctatcctactgcgtccccccatcgattaaaacgattataggtggtacaggaatatcaacctgttatccatcgcctacgcctgtcggcctcagcttaggacccgactaacccagagcggacgagccttcctctggaaaccttagtcaatcggtggacgggattctcacccgtctttcgctactcacaccggcattctcacttctaagcgctccacatgtccttacgatcatgcttcaacgcccttagaacgctctcctaccattgtccaaaggacaatccacagcttcggtaatatgtttagccccggtacattttcggcgcagtgtcactcgactagtgagctattacgcactctttaaatgatggctgcttctaagccaacatcctagttgtctgggcaacgccacatccttttccacttaacatatattttgggaccttagctggtggtctgggctgtttccctttcgaacacggaccttatcacccatgttctgactcccaagttaaattaattggcattcggagtttgtctgaattcggtaacccgagaggggcccctcgtccaaacagtgctctacctccaataatcatcacttgaggctagccctaaagctatttcggagagaaccagctatctccaggttcgattggaatttctccgctaccctcagttcatccgctcacttttcaacgtaagtcggttcggtcctccattcagtgttacctgaacttcaacctgaccaagggtagatcacctggtttcgggtctacgaccaaatactaaacgccctattcagactcgctttcgctacggctccacatttactgcttaaccttgcatcaaatcgtaactcgccggttcattctacaaaaggcacgccatcacccattaacgggctctgactacttgtaagcacacggtttcaggttctatttcactccccttccggggtgcttttcacctttccctcacggtactggttcactatcggtcactagagagtatttagccttaggagatggtcctcccagattccgacggaatttcacgtgctccgtcgtactcaggatccactcaagagagacaacattttcgactacaggattattaccttctttgattcatctttccagatgattcgtctaatgtcgtcctttgtaactccgtatagagtgtcctacaaccccaacaagcaagcttgttggtttgggctcttcccgtttcgctcgccgctactaagggaatcgaattttctttctcttcctccgggtactaagatgtttcagttctccgggtgtgccttctgatatgctatgtattcacatatcgataacatgacataactcatgctgggtttccccattcggaaatctctggatcaaagcttacttacagctccccaaagcatatcgtcgttagtaacgtccttcatcggcttctagtgccaaggcatccaccgtgcgcccttaataacttaatctatgtttccaccatttttataagtcaaacgttaacatgaagttacgttcttttataaaaagatttaaacgcgttattaatcttgtgagtgttctttcgaacactagcgattatttcttatgaattcaagcttatttaaaactctttattcactcggttttgcttggtaaaatctatattttacttacttatctagttttcaatgtacaatttctttttagtcaagcgctcgcatactgctttattttcataagcaatatcgctttaaccaaaaaatatttgaatgttaaataaacattcaaaactgaatacaatatgtcacgttattccgcatcttctgaagaagatgttccgaatatatccttagaaaggaggtgatccagccgcaccttccgatacggctaccttgttacgacttcaccccaatcatttgtcccaccttcgacggctagctcctaaaaggttactccaccggcttcgggtgttacaaactctcgtggtgtgacgggcggtgtgtacaagacccgggaacgtattcaccgtagcatgctgatctacgattactagcgattccagcttcatgtagtcgagttgcagactacaatccgaactgagaacaactttatgggatttgcttgacctcgcggtttcgctgccctttgtattgtccattgtagcacgtgtgtagcccaaatcataaggggcatgatgatttgacgtcatccccaccttcctccggtttgtcaccggcagtcaacttagagtgcccaacttaatgatggcaactaagcttaagggttgcgctcgttgcgggacttaacccaacatctcacgacacgagctgacgacaaccatgcaccacctgtcactttgtcccccgaaggggaaggctctatctctagagttgtcaaaggatgtcaagatttggtaaggttcttcgcgttgcttcgaattaaaccacatgctccaccgcttgtgcgggtccccgtcaattcctttgagtttcaaccttgcggtcgtactccccaggcggagtgcttaatgcgttagctgcagcactaaggggcggaaaccccctaacacttagcactcatcgtttacggcgtggactaccagggtatctaatcctgtttgatccccacgctttcgcacatcagcgtcagttacagaccagaaagtcgccttcgccactggtgttcctccatatctctgcgcatttcaccgctacacatggaattccactttcctcttctgcactcaagttttccagtttccaatgaccctccacggttgagccgtgggctttcacatcagacttaaaaaaccgcctacgcgcgctttacgcccaataattccggataacgcttgccacctacgtattaccgcggctgctggcacgtagttagccgtggctttctgattaggtaccgtcaagatgtgcacagttacttacacatatgttcttccctaataacagagttttacgatccgaagaccttcatcactcacgcggcgttgctccgtcaggctttcgcccattgcggaagattccctactgctgcctcccgtaggagtctggaccgtgtctcagttccagtgtggccgatcaccctctcaggtcggctatgcatcgttgccttggtaagccgttaccttaccaactagctaatgcagcgcggatccatctataagtgacagcaagaccgtctttcacttttgaaccatgcggttcaaaatattatccggtattagctccggtttcccgaagttatcccagtcttataggtaggttatccacgtgttactcacccgtccgccgctaacatcagagaagcaagcttctcgtccgttcgctcgacttgcatgtattaggcacgccgccagcgttcatcctgagccaggatcaaactctccataaaaattatgatgtttgattagctcataaatactaaataatgtttgtaacttatagttacgtttttggaattaacgttgacatattgtcattcagttttcaatgttcattaatgttcaatctcttttattgtacttcattaaattattgaagtcaataactttttgaacgattactttatttattttatattgtttttatagttatttcaatggtaagttttacacttttgaaattcttctttaaaaacatcatcgccgtttttgacgactttattatcttatcaactttataatttaaagtcaataacttttttgaaaaatattcgtgtttgcaagtcgcttcttttttcaatgcgttgattgcttaacacaagaacttattttaccagcattttaaaacaattcaatataaaaacgtacaaaataaaagtaattttgtacgtttagcatatattatacctatttatttgtcgcagctataactttttgtgcaatcgagctataaattttacctaatctgtcttcagcttgataaattgaaggtgcaaagtcttttggattccaagacggttgctctaaaggtaattccccaagtaattgagtattaagttcatcagctaacttagtaccgccacctttaccaaaaacatattctttattacccgtctctttactttcaaaataactcatgttttcaattactccaagaatagaatggtccgtatgttttgccatcgcacctgcgcgagctgcaacaaatgctgctgtaggatgaggtgtcgttacaataatttccttacttgaaggtaacatcgtatgaacatctaaagctacatcccctgttccaggtggaagatcgagtattaaatattcaatgtctccccatttaacttctgtaaagaaattcgtcaacattttacctaacattggccctctccatataactggcgcattttcttccacaaaaaaggccattgatataactttaacgccatgacgttcaactggaattacttccttccctttaattccaggcttttcatcaatacccatcatatctggtacactaaatccatatatatcggcatctactaatccgacttttttaccttcacgggctaaggcaacggctaaatttactgcaacagtagatttaccgacgccacctttacctgaagcaatagcaataaattcaactggattattttgagataataagccttctatcgttttaggtttattttcttcttttggtttaaattgatttactttttcttctggtaacgtttcaaatcgtatacccacagtttttgcaccattttcttttaaaacattaacaactgccatctgtaaatctaattgcggtgcgccacctaattgtgccattgccactttaacacttacatgttctttttcttccttaatagaaacttctacaataccttctgtttcttttaaaggtacatctataataggatctttaatttctcctattagttctttaacttgatctaccgttaacaaagcaaatcccccttaatcaatttaaaatatctacatcatagcaaataacaatttttgcttagtctatcaataaaagtataaaacttttcattaaataaaaaaagaagttagcctattattttcaatagaccaactactataattattttaaaattcccttctattactttctattactttaggttctcttataaaaagcgctatcacataagctgccataacaagcacagctacaaaagcaaatgagatatccacccctatagcaattgattgctgtttaatttcagttgcagttaaatgcgatggcgatgtagatgagaatatttttgcgccaaaactcatcaaagtaaccattaatgctgttcctaatgagccagccattacacgaccaaagttcataatagccgtgccatgtgagatttcttcatttctcaaagaattaattcctgtagtatttatcggcatcatgagtaaagaaactgaaaacattctaattgcatatacgactattaaatacgtataagatgtgtctgtatgcaagaaacacaacataatagtagtaattgttaaaatcgtaaaaccagtataaatcagtggtctaggaccatacttatcataaaatttacctgtaaaaaccgacataataccatttatgattgcacctggcatgataacaagtccagacaataatgcagatagagctaagctattttgaacatagagcggtattaataacgctggaccaaccattgacatcattatgatcattgagctaatcgtacataatgcaaatgttctatttttaaaaacacttaaatttaaaagtgcattgcttatattgaattgtctacgaataaataagtagatgataatagaactaattatcatggcaccaatgactaccgggctagtaaatcctaggtcgcctgcactactgaatgcatataacattaatccaaatccaatcgttgaatacattacagagcgcttatctaatttagtatatttcacttcattatagcttgaaattgaaattaaaccgaagatgaatgcgactaaagcaattcctacaattataataaatggtactcgccaactcgcttgatcaatgattaatccagtaacagtaggcccgattgctggtgcaaattgaataactaaaccagctaatcccattgcaaatcctctatgttctttactgaataacgtaaacaatgtgaattgcattaaaggcatgagtacgcctgcccccatagcttggatgacacgcgctaccattaatacgccaaaattgggtgccatggctgcaacaattgatcctactaaaaatgtccccatcgctgctaagtataaaggtctagttttaatcctgtccattaagtatgctgttagaggtatcatgacgccattaacaagcataaacccagtaactagccattgcgatgtactttcattaatatttaattctctcattatactaggtaacgctgtatttaataatgtttgatttaaaatagctacaaacgcactaatcaacataacagcaactatgaagtttcgtctccgggttgttaattcaactttagccaccacaattcctcctttgtaacaaatttacgtttattagcatatatacttaaaatatatttcagattaaagtaccaactatttatatcaatggttattattaaccgtgattaattgaagcaaaacaactcattttctactatatgaataaaaagaagttggaacacatcattgcccccaacttcaaacctctattttctattgtttagatttttactttcagggtaaaactgcagcttacaaacatataaaaagcctataataaccatgatgacccaaaaatcaatattgatatacacatagttcagatgaataataaaataaaataacgttgttgcaaccatataagagattaaatgaaaagttgcacctctaaaataagcattttcaggtaacatttttctaaaataatccatcaaattttcaactgcaaatacgataaagtagccaaatataatataactaccataatatagcaaattgtcgtacatacttctgttatatgtgaagtcacctaacctaaaataaataagaattctacttaatccatatagtccgaaccctaaaaacgttaagaatatcgcaccagaaagcacaaagataaagagaacaataattgttgttaataaattataaaacttatgtttaagataattcataactattgtcctccttaccaataataatttatattgcttgtaattttaagatagttgattacacttcaaacttagtaaaatgattatttgttactttatttacactacatcaattttaatcataattctattcttttgtttgtgacgccgcttctctataaaatatgagccatacaacgatgagccctacacttatcaaggatacaacgcctaaaatattatgcaagtttgcaccaaacaatcctgattttaatgcataaaggtatcccataatcgtcgaacctattgatgcgccaaggttttttgttaatccataaaacgacatcattttcttcatttgtattggacttgtttcctcttggacaattacactatcttttgtataaatatatccaaagcttagtccacttaaaattaagacacatgctataagaattggtaattttataccaaacgcaatgattatactacttaataataataatgtaaaagacgacaaatagataacttttcttgataacttcgcttcaatatggtgcaaattaaaattcaatgtaatccacgctacagaaagtggaaaaataactaatccactttgcaatggcgataaccccagttgttcttgaagatacacaggaatatataaattaaagcccattaaacaaacagctgtaagaagatctgtaataaagaccaaagtaatcattcgattaaattctgctactggtaagaatggggatgaaacttttttctcaacattaaataatcgaagtgcaactaatattgctaagacaaaacctatgatatttaaatataaatgttgttggtttaacaatgcaaacataattaaaccaatgaaaatataaaacagggtgatacctttagtatcgaattttgatttagccacagttttttcttctggaaaatgaaatgtccagacaaccaatattattgcaataatcgcaatcggtatatttatgtagaataaccaatgccatgttgcaaattctaatatgccaccacctagaagtggtccaatgatactcgaaatcccccaaacgctaccaacgatacccataattttatagcgtaatggaatttcaaacgctaatttaggtacaatttgtgacaaggacatcatgacaccagatccaaacccttgaattacacgtgatataatcaacatactaaaatgtgtgcttaaacctgacattaaactaccaaccgtgaatagtgtaagacctgcgatagcaatataaataattttaaaacgagttaataattcacctactattggattcgcaatcactaatgcaataaagtaagccgtaaatattaatgaaattaaattccctgcatttaaatcttgcttaattgttggtaacgctaaagaaataattgatgattcgattgcagccataaacatgattagtattaaagctattacagttacaattgattttaaacgcatgctatacctccttttataataatgatagtgctatgtaatttctaattttactatttcctatcttatcctcttttaaattcaaattagtttttttaaaatctatttgttacacctactaaaaaattcaaataaacgtatccatcaaatgtctgattaatacaaattaagtgcactcccagctttaaaaatcataccgattttaaaaaagcaaaacaatcctctattagaatgaattaagtaataaaaaaagcggagtttcccccaccttctgataaactattacataaaatataaaatagcaattaaatgcaataatgatgctataacgataaaaatatgccatatcatatgaaaatatggtctgtttttttgtgcataaaaccaggcaccaattgtatatgacacaccacctaagaaaatgaataatatgaatatccatgatgtgcgaataaaaataattggtaacaagataatacctacccagcccatcactaaatagacaattaaacttaacttttgattaactttgacagctatggatttatataaaattccccaaagagtcgttccccataataaaataaatactgtccaacctatccaaccacctacaattgttaacaaaataggagtgtatgtacctgaaattgctacgtaaatcatactatgatcaataatccttaaaatatatttatggggtgtttcattttgcatagagtgataaattgttgatgaaataaacatcataaagatagaaataacataaattgacatactaactgatgcaagtgtgccatttgcaatataactatgtacagccgcataaggtaagactaatagtgttaacagcgctgccagaccatgagatgcagcattgcctatttcttctccaaatgacaatggaatgatatccttaaatgtttctacaattgtgtcattactttttttacttgatttggacatcatagtcaccgcctaacattaaattaaacccattctacgtaaatcttcagtcgctgttgcaacactatctttaccttctttattttttagaggtgagaactcttcttctctaggaacttgtaacgtgacaaaactagttccataagtaaatatgtcaaaatagaacaattcgaattttaaagttggttgttcaataacaccaaagttctcatctaattgcttcaaattcttaatagctaaatgataaggtaattcacgatttacagcatttataataaatccaagtttaaatgcatgaataccgatattagcattgttaaattgatttgcaacttctggatctaattctgaatactccaatactgtatctttacaatcgacattaactaatcgtccaacactttctcctggttttggttgaatcgttttagaagtaatatcgtaatcatgttctaccgtaaatcctgcaaatagtggatccaacacttttactaaaacattgtcgatattattcaagaaaatatacttaacgccattattagacatttcttctaagtatcctgacttgtctaaagatttaaacacgccaccattaccatttggcgtttccataatacgaccttgttgatttaaaattaacttcccttcttcactaagcgccacaatattatcttgtttaaagaaatgtattgcttcttgatcataaccaaagtagttatgcgattcaaaataagctaaagtttcttcatgattgatatcacttgtcataatgtaccattgaattatatgaccagtttgtcgatgtagttcttttaattgttttgcctgaagttcaaataaacttacaccttcaatttcgaatgaacctttaggtcctttatatccaagtcttgttccttgtccacctgccatcaaaagtactgcaaattgtccttctttaatagcttgaagtccttgttcctctaaacgcttaatctcatcatcactcatttgtgatttaatatcatatttcacttcagaaactgcagatacatcatctattgttttcttattgatgtataaatcgttatataatttggcaataaaatctaaatctaatgacgctaccttctcttcaagcgcttctttttcattattactcattattttttcatattcacataaatgatcttgtttatatttagctaattgatttttatctagcattttacgcctcctgctgagtttgtaacctttaataatttattttctataaaaacttagtattccagttgcttattatatcattgatgaaaggctgaaataaaacataaactgttccgaccattaacgcagtagctaaagataagtctacaagtccacctgttttaaattgaatcggtgtcttcacattaaacggtaacggataaaataatttcacgccttttggtgttatcatatctagtataacatgtgacactaatccaattataattgctgccatataataattaggcgtctgaataatttgcaataaaaaggctatgattgcgataaataatattgaatgcgtaaaggttcgatgtccaaagatcaatctcacaaaaaaactaattaccttaaaccttctgccaatcttactttgagtgtgacatatatcgggtaataagctagctagagttgctagaatgataaccgtaaccgacgaaaaaatatccgtttgaaaatattgtgttgttagcgctccaacgagcatgccgcatgaagcatgtgttttacctgtcatatttgttctcctttaatactcacattttaccataaatccgccaaaaacacgaacatattttcggtttgagcttcattagtatgacacaatttaaaaaagtatcacataactcttgaaaacgattacaaaatcgtttatgatgtatttacaaaatatttaaaggatgtgtttgaataatggcaatgacagtaaaaaaagataataatgaagtgcgtattcaatggagagttgctgatatcaaaattcctacaagtgaaattaaaaatattacacaagaccaagatattcatgcagttcctaaattagacagcaaagatgtatctagaatcggctcaacatttggtaaaacgaatcgcgttattatcgatactgaagaccacgaatacattatttatactcaaaatgatcaaaaagtttacaatgaattaactaaataaattgtataaaaaaatcattcatggtgagggcttcatgaatgattttttttaattgattcaactcccagcataaacaaatacaaaaggacaactgttcccacaattttaacagttgtcctttcttatatctaattacaataacaagtgtgccatcaaagaaataatcggtagtgtaatgattgttctaattaagaaaatcataaataatttgccgatgcttacaggaatcttggaaccaagtatgacgccacctacttcagacaagtatatcaactgtgaaatacttagtgcaccaataacaaagcgagttatatcattttgtacaccttcaattaatatagaaggtaaaaacatatcggcaaaaccgataataatcgtttgagaagcttgtgccgcttcaggtatttgcattaactctaaaaatggaacaaaaggtttacccaatatgacaaaaaagggcgtgtagttcgcaataatggtagcaatagtaccaatactcatcactacaggcaaaataacaaaccacatatcaacgactgtttttaatcctgacttaaaaaagtcaataacgcccggtgctttaataccaacttctgttgcagtatcaaagccgtgtctcaatgccgtctttccttctggcaatgcctcagtacgcgcactttcgggtacctccttagcatactcatcaggaattttatttaaaggccaaattcttggcataatgactgctgcaacaaggcaggatactatcactgataaatagaaagcaaaaaattgattttgcatgtgcactgtttcagcaactacaattgcaaaagtgatagaaactacactaaatgtcgttgaaataactgttgcttcacgacgagaataatatccttcaccatattgtctacttgtaattaagaccccaacagttccgtctccaataaatgatgctaaattatctaccgtcgaacgtcctggcaatgtaaataaaggtctcataaccggtctaaaaataggacccaacatctctaacaaaccgtattccattaatagcggtaaaaatagagctgcaaataagaatactgccactaatgttggcaataaacttgaaaatagtaatccacctgtttcatctgaatatattacctttgaaccgatttgtaaaaaagtcatccacgcaaagataacggcaagtaatcgcaaaattaaccaacctattcttacattaaacgcattatgcaataatccgtcaggtttcaatttatcttttaaaacagttgaacaaatcagtgttatgatacccgataaagtaattatcgtcacaattaaaaatggcattacgccacctaatacatctttaagcacgcctgctaaaaatgccacgggtaacgttgtttgcttctgtccatcttgttcgactggaattggtactagaaataataagataccaattaaagacatcgtaataaacttaagtctcccaatgactatctctttccttgaaaagctatccataaaatcaatccatttctctatgtattcgttttaagtatatacagaattctattcagttaacaaacatattccttatcattctatcttttaaaatgtttatgtatgcaaaataatgaataattacagttattaaatatacgctatttcttgtaatttttcaagatgaaatcaaaaaaggttaagtacaattactgatttcgtacttaaccttttttaaactctaatcatatgttagttatttcattcttcgtaataatattaagaagtatggtgcaccgataattgcaatgataacccctacaggaatatccagtggcggatgaatgccacgggctaaaccatcaccaaatgttaacaatatagcaccaattaaccccgacatgataataacgtgtaatgttttatttcctattaattgtctcgcaatatgaggtgcaattaatcctaaaaagctaataccaccgacaactgaaattgcggatcctgctaatattactgctaaaattagcaatagcattttaatagttttaacttttaaaccgagtgcggttgcaacagcatcacctagattcaatacatctaattgataactcaataaaatgatgattggtatcgttattaaaaaccaaggtaatatagtataaatattcgacatatcatgtccatatagactacctgtcaaccaaacaagcgctttgttggcttccaatggatttctaattaataaaaattgaacaatcgccgtacatattgcgccaattgctaaaccaattaaggcaagctttgaacctttaacatcatattttgaaattaaaaatgataaaaataaacttactgcaaaggcacctaagaatgaacctataggtaatacaaacaaaggtgctgttggaaagatcataataataatcacagcagctaaactggcacctttagaaatacctataacatcaggtgaggctaacgggtttcttattacaacttgtataattgcacctgatatagccaagctactaccgataataataccaagtaatgttctaggtatacgatactcatttaaaataaaatcatcttgcgtaaagattcccttaatagcatcaatcggatgaatcatgacagaccctacacataaacttatgaatatactcacaattaaaaggattgtgattaaactataacgacgtataattttcgttgtcatcatattcttttcacccctttaatcgttataaataagaagtaaagtgcacctacgaatgatgtaacaatccctactggtgattcataaggatatgtaattaaacgacttaatacatctgatagtagtaacaaatctgcacctataataaatgttaatggaatcatgactaaataattcttactcacatagcgtttgacgatatgtggcacaattaatccaacaaagccaattggccctgctattgatacagacatacctgtaagaataatgactaatagtccaatgataattctaactttatttatattttgacccaatcccttagcaatatcatcgccaagttccattatcgttaactgacgcccaataaagattgttgcaattaatgcgccaataagccatggtaaaatggttaaaatctcatcccacttcatactggataatgaaccaacaagccaaaacatcacttgttcattagaattctcatttaagattataatcccttcagtcatactactaaaaaataaatgaatggccataccagccaacgctaatttaataggcgtcataccttttgtagcaccagaaagtgtgtagacagttaatccaccaataaaggcgccaatgacacctaaataaagtgcgtagtattctaatgacggaataataatcgttactaatacaatgacaaatgacgcgccagaactaacaccaaaaatctttggagatgccagtgggttacgagtcattgcttgcattaacaaaccagaaacggctaacgcaccgccaataaatagacctgcaagcattctcggcatacgtacattatgtaataaaaatgaagcttttgtatccgtatggccagtaacatagtgaacgatatcgctaaaattaatttttgaagaaccaattgccatatttaaatatacacaaataaaaagaaagcacacactcagcatatacgtgagtgttgtgcgtctttttcttttatgatctatggcagattggctacttatttctttcatagccatttacttccaccttacttttgttcttgtttagataattcaacaagttctttagccatttcttcagaagaaattaagccacgagatcttgcccaaacatcacggtcaacaatatcaacgcgattatttttaactgcattcaattttttccatgttgcatcttcttgtaacttcttgaattcagcagaatctttttttgcatgatctgtcataataatcatgcgttcaggatttaaatcagctaaatgttcagtgtctaattgtaagtaaggtcctttcaaatatttacttaaaccttttgttacatcgtcacttaatgcatttttaaatcctaattcatttaaaaattgaccaacataagagtagtttggatgcgctagtaatccagctttcgcaactactgctggcagtactttttgatttctatcaaatttaatttcatctttatacttattgattaatttatcatgctcagcaagacgtttttcgccttctttttctttatctaaagctttcgcaattgtcttgaaagcatcgatattttgcttgtagtcaccatcaaagctctttaatgataatgttggtgcaattttgtttaattctttattaatacctttatgtctactgctatcagcgataattaaatccggttttaatttactaatttcttctaagtttggctgtttacgtgtacctacagaagtataatccccaattttttctctaactggtttaatgatacgttttttcttaccatcatcagcaataccaactggtttaacgtctaatgctgctaatgcatctgcaaatgagtactctaatacaacgatacgttttgcatctttaggtacttttactgtaccattttcatcttttaccgaaatcgtatctttagttgatgattcttttttacttgaattatccgtattaccacaagctgcaactaaaaataaggcaactattaatcccaatatactaaaagtttttagacctctcatcgttccactccttaatatgtataacttcatttattattttattgataacaattatcattgtcaagtagcgttcaatcttttttatattactaaaatgtatgactatatatatatcccctctaataattatgactacaattagcacatttccttagacaaaatactgataatgtatcatggctatatcatctttgaattaatacaattgacaccatttagcatgaccgttatctctgtaattcagctgttattacctgttacattttttatgtgccgaactgttgcacttaaatagataaatcaacaaatacaaaaaatctaagttgaacaattatgatacaaccgtgtaaacgatatgtagtataactagtcaacttagacttattgataaatatattaatattggtttaccatagcaggagatttcacatcaaaattttgaagtagcgtatcaatatttgaatcatcaatatataccttatgtaaatttttcatatacatcgaatgagaaagtgcttcataatttaatgaaaaagatatatgatctccaacttgatagtgtccttgaccatttaaatcaagcattaaatgatcactcgaagcacctaaaatattgatatgctgatccataggtgaaatattatcgacttttgtatctaaataaccaatgtctacaatagcttgtatgaatgattcatgcgtttgtgtattaactcgaggtttaatttctaaaatctcagcctccaatgtaatcgcatcttgatataacatagctatcgcttgatttgtcgttgtatcaacacctctaaacaacgtttcacctattcgcaattcatttattttacccaaatcattatataaaagttgtggtaacatgctcgaattaccacctgaaataattttcaatcgatatcctatttctctttcaacagctgagacgaatcgattaatcataaagatatcatcatcacttggcgcatcagatttaaaacacataaaattgaatgctaaacctacaaaatggatatttttcaagtgaataatctctttaatataatctaaaacatcataagtcagaacaccttcacggccatctttccaatctaccattaataaaatcttatgtttttttcctaaaacttctgctacttcatttatttgatgtatggtagataattctgtttggatactcatatcaactttttctatcatatctgaaatctcttttttggcaggcgtacgcaataacgtatatgttaaatcctgatctgcaatactaattatgttatccaatctggattctgcaacatgattgatacctaacgcttttatgctttctacaattgtacggtcaccagctatgcacttaattactggtgtaaattgcatatttttactttgaaaaactgtttgaagtactttggcgttatatttaatcttcgatatatttatattaacgtgtgccatgtagtactacacctctttttttatcggattatctaactcaatatttaaatattgctttactttattttccattctcatatttaacaacgctttgacagtaattgttggtccaaacaaaatatcttttaactcatttgcatgtggtagtgttgggttaatggcatgcgctactacttgctgtactatgttaaataattcggtttcttcaacacaatcatactgattaaaatgatggattaattctgccatttgattttgaataacagcatgttggaattttgcaatcactgcatctttagaatcagctattaaactatcatttgtaattttaatatctgatacacgatgttgtaatgtttctaaatcaattctagaaccacctaaatctctcactaaaaattgaatgtcaaaatgtggccccaagttcactactgtattttgcatgtgtgcttctaatgcaattccataattttgaataaaagcaattaaaggcgggattaatgcttgagagtatcgttcaataaatgtcgtaatactttctttagtaactccttgatttaaccactctaagtaactatccacgataactttttgatctattggatttttattaactagacttgcactaactactgttgcaccttttccatcaatttcaggcttttgtcttataatacaagcaagctgacgcgccgtatctttatcaacatttgcatattcaccgaacggttccatagcaactttaaatcctggatattgattcaacatgttttgtaaagcataacttaactttggtccatctacagtagtcacagttgagactgttctaacggcacttgttgcttgtgcatcgacgggcaacttaacatgatatggtttatcaattaaagacatcgtcctgaatgataaagttgcttttgaaagtattgtaaacggcgttggaattaatatttttttagcaatccatgcttcaaaatatttccctatcgtatgatcatattgccaaggatgtactaaaatcgctctatagtcttcacttttcaaacctaaactcttcaaaaacacacgaatttgattgtagtattcgggaattatttcatcaataataaattgatcattaccatccatagctgtgcacacaacatggtctttttcaatcatcataatttgcaaagggatttctttttcaaactcaggtgcatatgctcgtacttcttccatagttaagggcaatttcgttttggttaaagggtgtgttggatgcccttctggtaccaaactctcagaataagttaaatcatctgtcttatcactatctttcacatgttgtagccatgcaaaaaaattaatatcttgtggcaatcttgaaaatttaaaactctgacttatcaaagtttgtctatgtgacatttgcttataagtttcaactaaactatcccgactatgtattaattcttcgcgtagtcgctctgaaatagggatatcaaagtcatcgttcaatacatctagtagcccttctaatgtcatgattagcgaggtttcacctttatttaaataagtaatatcacctgtaaactcatagcgttctaatgcactttttctaacaacttcaatagtcaacacatgcatatgatactgaatttcaattaaagatcctttttgcgaaataaatgtttgctcggggtaaatacgttctttaataatggcgttaattacacgatattgaatatttctatctgcctttgcccattcaagatataccatgattactttcctccaactttaacttcaactttctatttataaaatagaataccattgtaatgcatatagtacttattcccattattgaaaaagttctaacaatgccaaacacatctgcacatatactcattaacagacttcccaatggaatcatacctctatccatcataataatactcagtactttaccacgttcataatctttaacattattttgaaaataaacgcgatttgtcgtacgtgcccattgactaaataacccaatcaatgtaatacaaatgaacatgatgacaatattgtgaaataccacacctaacaaagcaatgccaaataaaaatgaacttaaataatacatatttaccataccaatatatttaagtactttaggtaaaactaatgttgcaataataccaccaatggcacacatcgtcatagcgataccaaatatttcagatttccccggaaatactttgtttgtcaaaactggtaaaagtgtcgtatatgaaaaacctgtcgccataatcaataatgatgttataaatatttgtcgaccttccatatgtaatttgaagtaatctataatgacttttaacggcatgtatcttgttgcatcttcaggtattttagtcactttaaaatgtagtggtaaacataataaaactgcgataaaataacaaattgcctgtgcaagaaatgttgttggcgcatgatagactgctaatatgacaccagcaatggctggccctattgaacgacaaatattaatgatgaatgaatgaaatgatacagcttgtgtagtagatattttatctgataaatctggtaagattgcttgtcttaaaggtgtttcaactgcacttaaaattcctcttaatgtcgcatatataataatgacgctaattggaattgcagtgaaactatacgtgagcacacataaaattgcagttactaaaaatgatgatgaaattgtaattctcagcaatcgccctttatcatatttatcggcaattgcccctgcccacacacttagtaacaatattggtacaagtctgcaaaaattgacaacccccagataaactgcgttatgataagtggtaagtacaaaccaatttagccctatttgtccaatccaattacctagaaatagtagaaaagaactgctaaaaaaatatcttgtcataaaacttacacccgcattctgttgataataagaatcattatcattaatatggattatacaaatctatcttgcttttgtaaaatatttcatagaggtgaattatgaacttgaacttaatttttaaagaacagacattaaaatttaacaaagaagaacaagaaacatatttatttttacaacaacataataacgactgggctaatatttttaaagagatgattttacaaggaagagataaagtcactcagagattagtcacatcaatgcatcgcgaaaacttagttaaaacgcgcactcaaagtaagaaaatattgagtcgtgatttgattatgttagatatctcaacgactcatatactagaaatccagttcccacaagctaagcaaacattatatgctcctatcactggagaacacgcctttgatcgaattgatgttgaaggccctttctacattaaagatgacattacaaatacgattacacgagtacaccatccaaatgaaattcttgagtgtattttaattgaagcaccagatttaaaaaatgctgctagtgatcaatttcagcaagatttgataaacagtgcaactaatatgacatttgcaatgagctatcaagcactgtcaatgcaacatgattctgcacctttatttaatattatcgaaaatagcgaagatagttacttgcgttcagagcaagccgttattgaaggtcatccgctacatcctggggctaaattacgtaaaggtttaaatgcattacaaacattcctatattcttcagaattcaatcaagctattaagttgaaaatagtactgattcacagtaaactaagccgtactatgtccctgtctaaagattatgatacaactgttcatcaactatttccggacttaattaaacaattagaaaatgaatttacgccaaactttaactttaatgattatcacattatgattgtacatccatggcaattagatgacgtattacattctgattatcaagcagaagtagataaaaaattaatcattgaagcaaaacatacgttggattattatgctggtctatctttcagaacattagttcctaaataccctgctatgtcgccacacatcaaattgtcgacaaacgttcatattacaggcgaaattcgtacattatcagaacaaacgacgcacaatggtccactaatgacacgtattttaaatgatattttggagaaagatgtcatatttaagtcctatgcatcaacaattattgatgaagttgctggtattcatttttataatgagcaagacgaagcagactatcaaactgaacgaagtgaacaattaggtacattatttagaaaaaacatatatcaaatgattccacaagaagtcacaccaatgattccttcaagcctagttgcaacctacccatttaacaatgaatcacctatcgtgacattgattaaacgttatcaatcagctgcatcattgtctgattttgaatcatcggcgaaatcgtgggttgaaacttatagtaaagcattgcttggtctcgtaatcccactagttactaaatatggcattgcattagaggctcacttgcaaaatgctattgcaacattccgaaaagatggtctattggacacgatgtatattagagactttgaaggtttaagaattgataaagcacaactaaatgaaatgggatacagtacatctcatttccatgaaaaatcaagaattcttactgattcaaaaacatctgtgtttaacaaagccttttattctaccgttcaaaaccatttaggcgaattaattcttacaatttctaaagcatcaaatgattcaaacttagaaagacatatgtggtatatcgttcgtgatgtactagataacatctttgatcaacttgtactttcgacacacaaatctaatcaagtaaatgagaatcgcataaatgaaattaaaaataccatgttcgcgccattgatagattataagtgtgttacaacaatgcgtcttgaagatgaagcacatcattatacttatataaaagttaataaccctttgtatcaagaaaataattaaacttatagcattttattaatcgttagcgaatggattattttagcttattaaatacactttatacaaatgagagtataacgcatctcccatattcaaattattaaaaatcacaaaaaagctcggcacttaaattgagtgccgagcttttttatcgaataacttattgtaacccttgtctttcttggttattgttttcgttatttttttcgtgtttttgtttccactctttttgagtcattacatcgtcaacttgcatgttaacttcaactacatctaaaccagtaatatatttaacttgttctttaactaattcagtaactttacggaagattttaggtgctgattcaccatattctaaaattacttttaagtctacagcagcttgtttttcaccaacttcaacagatacaccttgtgtaacgttgttgccacttgagaatgcattagtgaatgtatcagttaagccacctttcatgtctaagatacctttaacttcacgcgcagcgataccagcaattttttcaacaacttcatcagagaatgttaatttgtttttgaattgaggctcttgattttgttcttgttgtttttgacgctcttctctttctttttcgttaacaccagtttgattgtcgtatgcttgttttgctttattgttatctacagtcataatagattctccttttacttgttattttttatatttttttaattaaattctaaattgatgaattaactccatcgatttaaaaaattcataaaatcttgcttacggtctttcatatacccaatacctacaccaattaaacataaaacgatgataagtactgttttccaaaaacctaacgttaagaataatatcgcgattaatagaaacgctaagaaaccaacgattctccatttaaatacttttaaaaaattaatcacttgttgtgtagagtcttgtccgttttggttatgattgttagccatgatatacctcccttacaacactcgtggaccagaagttttctgatctctcacatttacttctaacttacgtactggcatttctgtaaaatgttctacattctttttaatatccgcacgaattgcttcagttaaagattgtacttgaacattatttggtacgaaaaagtcagttttaatgtcgatataagatttattttttttgttatatagctttgcaactacattcggttgtcttacttggtcatattttgcaactgtatcaaatgcagttttttcaacagctttacgagatacgtaaacatgaccatcatcgaagtctttgtataatccaggttttcgatgcgtaggtttgaagatactaaatactaatataagacctattaatatcaatagtgcagcaagtgaaataagtaatggttggaaccattcaaattgaaggaagtagtcttgatattcagttatacgtccatcttggatatacatgaataacaggaaccccacgattactactattaataagccaaggataaagtttttaagtcgtttcacccctaacgacacctccttagttaaagttaatttaaaaacatattaaatatgtacccatcagtttttttcttaaacataataaattaataactttaaatttatttttaatatataagatgaagtaccatttagtaatatattccctagtttttgtaaataaaacctctttgttaattaatttccgtcaatatgttttgaagaacgatattctaatacgtctgggtcacgatgtttaattaaaaccttattactatttctcggtttctcctcactcaaagattttaaaagcgaccatatcatcgctataatgaccacggaaaatggtaacgcagcaatgattaataaattttgaatcgcttgagtaccacctgtgtaaatcatgatgattgcaaataatgccataatgataccccaactcactttgacaaatgacttcggattaatatcaccacttgaactcaacatacctaaaacataagttgccgaatccgctgatgtaacaaagaaaatcataataacaagtaaagtaattaagcttaatacaaaacctagcggataatgttgtagcgttgcaaaagttgctgtttctgtcgcagctttagcaatatcggcaatatgattatcttgtaagtaaattgctgacgcgccgaataccgcaaagaatataatgcaaactaccgccgggacaaaaagtacacctagaataaattctttaatcgtacgtccttttgacacacgtgctataaagatacctacaaacggtgcccaagatatccaccatgcccagtaaaagattgtccaattttgtaaccattggaatttttgaccgccagacggaatgcgtaaactcatactaaagaaatttgcaatataattacctagaccattcgtaaatgtatttaaaatgtaaagcgttggcccaacaataaaaagaccaataagtactacaaaagcaagtaacatgttgatattactcaacgttttgatacctttatcgatacctgaccatgctgaccaagtaaataatatggttgcaatgacaatcaagattacttgcatcgtgaagttactcggtacattaaataaaaaatgtaaaccttcgtttatttgcaatgcaccgaaacctaatgttgcagcaacgcctgttactgtagctatgactgccaatacatcaatggcaccacctaaagggccacgcattgctttttcacctaataaaggcgttaatgtagcgctgactaagccaggatatcctttatgaaagctaaaataggcaaacacaagcgcgacaataccatagactgcccatgcatgaatcccccaatggaaaaatgaaaactgcattgcatcattaattgcagattgcgtgccagctttatgaataggcgttaatttgaaggcgtgactgattggttctgccgttgtccagaacacaagtcctattcccataccagcactaaataacatagcaaaccaagatggcaatgagaattctgggtcttcgccttcttcacctaatgtaatagatgcgtatcttgaaaataatatatacacacagacaaataaaataactaaaacgagcagcaaataataccatgaaaaatgcaacgctataaatgaagtaatgttttgcgtgagtgtttctaactgcttgggaaatatggcaccataagcgacaaatattgtacatatcgctaaagatacccaaaacacaagacttacagatttatttttcataaatacaaaccctttctgtgtaatggtaagttcatacccacaactgcaacattttaatcatttgtaattttatatagacacaattaataatgcttcatcttttaaaaatgatatataaaacacactcaaattatttatcatcgaacaacaaagtattttattgtatttaagtaatgccttactattgcattattgaattgatacctgcaaagttgccatatttccctttagaatcaatagtcgctagacacaaaaaatagagcttgggacattaagttcttaggcaatgtaaaaaagctgatttctattaattatttgatagaaatcagctttttttaaatgtatttgataatatacagctcgtcgagctactattttccttatattaagtgccattaatacaaaacctagctctcgtttaactttatttattcctcgaactgacattcgagtgaaacccaaaatagccttcataaatccaaaaacaggctctacatcaatttttctttgactatagatttttttcgtttctggttcagaaagcttttgattaatttgggctttaaagtattcccaattataattcttcatgattttcttattggatttcgaatttggcttcatgcattgttgcctcaaagaacatgctgaacagtcatcgcattcatatagtttgaagtcacgtttaaaaccatatctatcattacggtatgcatatcttttaaaacctattcttttgttattaggacatataaattcatcattaagttcgtcatatttccaattttgagtgttgaaaatgtcacttttaaactttctagttttatctttaataaacatgccatacgtaataagtggcgttttattaaaatcatctataatagccatatagttttgctcactaccataacctgcatcagctacaatatactctggtaaataaccgaaggtattttgaatcattgttaaaaatggaattaaagttctagtatctgttggtttttgaaataggtcataggataaaacaaattgagaatttgtcgctatttgtaaattgtatcctggcttaagttggccatttttcatatggtcttccttcattctcataaaagttgcatcatgatcagttttagaaaagctatttctatctttaagaatcgatttttgcccttcatatttactttttctttcagaataatcatcaaatttatttttgaacttcttaatcttagttctttttttacgggtctgttttctaatttgagcacaatcttcgttctcaatagaatgatttaaatcttcgatttatttatctaaatgagtacctattaaatcaatttcttttgttgttaaatcgctatctccatcttctttaatctctggtattattttttcttcgactaagtcacgatataatgcttttgaattttcgttcaatttcgattcgtgattttgaatacttttcttccacacaaatgtatatctattggcactagcttctacttttgtaccatcaataagattttactttaaacattgactatggaactgaataaataaagattcaattaacgcatcagtattaggattcactctaaaacgattaatagttttataagaaggtgtttgatcttgagctaaccacatcattcgaatactgtcatgaagtaatttctctattctacgaccagaaaatacagattgagtatatgcatatcagatgatttttaacatcatttttggatgataggatgttgcgccacgatgatgtctgaattcatcgaattcgctatcaggtatcgtttcaacaatttcattaacatatcgcgaaatatcattttgaggaattctaacagaagtttctattggtagtgtaagttgggtcatgttataatttttatacataaggcacctcgttaatttagtttagtggtatttattaaattatacgaaagtgtcttatttttttaaagtatttcaaagtaaaattacatgttaatacgtagtattaatggcgagactcctgagggagcagtgccagtcgaagaccaaggctgagacggcaccctaggaaagcgaagccattcaatacgaagtattgtataaatagagaacagcagtaagatattttctaattgaaaattatcttactgctgtttttttagggatttatgtcccagactcttacttactaaactatatattaattactaatttcccaatcattgattgtttttctaacaattgatgtgcttgatataagttttcaggtgataaaccttcaaaaacttgtgtcgttgttggttgataatgtcctgattctatatttttcgtaatatcttctaaatactcatgttgtttaatcatatcaggcgttcgatgaattggacgcgcaaacataaattcatgtgtaaatgttatactttttaattttaatgcatttaaatcttgatcttcattaaaagctacgatagttgtaatatgccctaatggttttatcagttcaagcatagtattgtaatacaagtctgtattataggtgcaaaacatataatctactaatgggatgttttgttctttaaactgacgcactaaatcctctttatgattcaatacgatatctgcgcccatcttttcacaccactctgttgtttcttgtcgcgatgctgttgtaatgacagttaaaccataccgtttagcaatttgagtggcaatacttcctacaccccctgcgccattaatgattaacacggatttacctatattttcagaaggattatgtgaaattttaaatgtatcaaaaaacgtttcatatgccgtaataccagttagcggtagactaacagcttcattagcacttatgttgtgtggcgcttttgcaactatagcttctgacaccaattgatatgtcgcatttgatccttttctatttggcgatccagcataaaatacaacgtcacccggactaaataatgtaacgtctggtccgatagcttcaacagtaccaatagcgtcaaacccaagtacacgaggtgcttgagtgacttccatttgtcgttgctttgtatctacaggatttacactaatgctatttactttaactaagatatcatcgtttgctggcgttggcttactttgttcgtatactttaaataaatttccttcttccaatttaaaaggcttttcaaatcctatcattttcatatcgtttcacctcatttatgaacttatctcttattatacaaaatagaagccatgtgtgcttatatcgcagcaacatgactcctttttcatttgaatatataaataattacagacgactttcgtattacattttagacttatttctaccatgttacagaacaaatttgctttagctaagaaagttattaaattttggtcaattaacaaagttgatttgtaaaaacgtatactttattattccgttactttaataacttgtttaccaaagttatcgcccgtaaataaatttttaaatgcacgtggcgcattttcaaaaccatcttcaatggttacttgtgactgaattttaccttcttgaacccatgttgcgagctgttcactagcttctttaaaagcattagcaaattcacttactaagaaacctctcatcattacttgcttcttaataagcgtaccttgaatacgtggtccgatatctgcttcaggatgattatatgacgaaattgcgccacatactggtacacgtgcaaaacgatttaaatgcttaaatacttcatcaccgactgtaccgccaacattttcaaaataaacatcaacgccatctggtactgcttgcgctaattcttttgcaaaatctgctttcttataatcgataccagcgtcaaagcccagtgtctctgttaaataatttacttttttgtcgccacccgcaatacctacaacacggcaacctttaatcttagcaatttgacctacaactgaacctacagcgccagatgcagctgaaaccacaacagtatctccagctttaggttgaccaatatcaagtagaccatgatatgccgtttgtcctggcattcctaaaacacttaaatataaatcaagtggtacatctgtagttggaactttagtaatttgatccgcttggacatgattaatgattcgccaaggcaacatacctacaacgacatctcctgcttggtaatcttcatgttttgattcaattacctttgcaacaatatgactgacaatcggtttaccaatttcaaaaggctgtacatacgaatctgccttagtcatacgtcctctcatatatggatccactgaaatgtatagcgtttgtacaagtacaccatcgctctcaagtttaggagtgtcaatatcttcaattttgaatgtatcctcttgtggcataccttcaggaattttattaaatagaatttgcttgttttgcatcattaatcacctttccatatttagaaacttatctttattttttatttaaatttaagtttaaaaagcgtaatcgtgatgctagagtattcttagttgtcagcttttgacttaaacattggttcatataacttcatccacattatatttcctacatttatgaatttaaaatatttcggcttataagcgtatattctttactcatattctaactaaatggtaactggtattattttttccataaaaagtcaattagctcattcgcaacgttttcgttttcatgtagctggctatgttgtgctgactcaccttcatatttagattctcgataactttttggactatttcccagtaaatattttaatgatttcgaagaactattagacactctgccgtctgaatgtgtaccatctttcaaatctccataaatatttagcacttcgatacctttacctttataaatatcttttagcacgcgtagttgctgataaggttgattcattcgacttggtttaccatctttatcaactgtaatttcattgacatcttcattcatatttaagacgccgttaaatgtacccgcaatattcacttgcttgtttaactgtggtaatgatttgtcgttaccatatgtcatcatatattgtgcaaatgttaagtttcccattgagtgaccgacaaagttgaatttatcgaaattgtattctgattgaagcttagtcagtacatttttaaaccacgcagcattcttatccaaatagccttgtctattattttcaagttcaattttcacaataggattcacagcatttttacttatcttccctttaaaagtaacctcaccctcatttgaaacataggccgtaataatatctttagtgacacctcttttttctgcttgcttcaccataaatttttcagagttggcactaccaccaaatccatgtaagaacaatgtcggaattggctttttaacaaattgctgttgttgtattttaaatgtttgtgcctgtcgttgactaaacacaaccgtaataatagtgcctataataatagcgaccgctaacaatgtcgtactaattacaaaaattttcttcacacttttaactcccattcatgtcttttatttaagtataaaggatgtgattaaaaatgtcctttagttgattttgaatacatcattaacttttaagatgactttggagaattgtccgttaaagtttataaattgattgcttaattagctttcaatgatgtgtttcctattgattaatataaaaatatgtatatgcatatttagtttctctctttttataaacaaagacctaccagcacacgactgataggccttttaatatcttttattatttaatttcttttgtttcggctaactctttgtaccaataagcacttttcttaggatagcgttcttgagtctcaaaatcgacatagaataaaccatatcgtttttcataaccatttgaccaagagaacacatccattaatgaccaaataaagtaacctttaacatttgcaccatctttaatagcatctgcaataacgtttaaatgttgtcttacataatcaatacgtgcatcatcatgaactgttttttcagattcaataaattcatctttatatcctaaaccattttcagtaatataaatcttatgatagttaggataatctttaacaacacgcatgatttgatcatataaaccttgaggatagatcatccagtcccagtctgtgcgaggtacgtcgacatcaaattcacgttgtccgacacctttaagttggtatttagaaccgcctttatcacctgtcgcattatgagtgatttcagattctccatcgtaacctctcatccagtcactcatgtagtaattgatacctaagaagtcgtttaaatctttggctgcatctaaaatggcataatcttcatctgtaatgtttaatttaccgccattaacagataagatatgttgcacaccttccatcgtttcacgagaatacttacctaaatatgttgcatctaagatgaatttgttatggatgatatcttctaattctgctgcacgaacatcttcaggatttgatggatcgaacggatattttgttggcaatgcgtgtacaacaccaatttctccttgatagccgccatctttaaataattttactgctcttgcatgagcaaccatcatattatgatgagattggaaaactttttcaaaatcatatttaatacctggagggaatttacctactaaatattggccatcaccaattggtccaatttcattgaatgtagtccaatattttacttctgggaattctttaaaacaaaattcagcataatctacgaagtaatcaatcgttttacgatttagaaaatcaccatctttgtgtaacacttctggtgtatcaaaatgatgcaatgttacaaatggttcaacatggcgtttatgacactctgcaaataacttatggtaatactcaacacctttagggttaacttcaccatagccattcgggaagatacgagaccatgcaattgaaatacggataccattaacaccgaatttttcacttaattctaaatccactggatatctgttataaaaatcactcgctggttctgcagtgtaccaatagttttcttctaaatacgtatcccatgctacgcgacctttaccatccgtatttgtcgcaccttctgcttgatacgctgctgttgctccaccaaaaataaaatcttcaggtaatgttttagtcatatgaaaaactcctattcttaattttcaaattgtttttgtacgaaatcaagggctgcttggccatctcgtgtcaatttgatatattcagcaccttgagtcttcgctaatttaatacctaatctatctgtatcttgcttaatatcttcatagttagacgcaacttgtggcgctaaaatgattaattggtactctttcataatgtccatatgtgcgccgtatccgccagctgctgctttcactggcacatgatattcttcagctgctttattaagtgcgttggctaataatccacttgtaccaccaccggcacaaagtactaagacatttgtttgttctgtgatatttgaagctttagctgcatcgtctgatacaccacttgccgctaaaattgaatcagcttttttcgtatcaaagtttgctgcaactttttcttttaaatctgaattactttctttacgtccttcttcttcatcaagaatttcactgtcataaacttttaggaatgggtagtaaataataatatctacaacaattaaagtaatcgctagtacgaatgaccataaaccaaatccagtacccatgatgattccgagtggacctggtgttgtccatggtaagttcacactaaaactgttcattcctaacacttcaacgaaaagtttaaatatccatacgttcacaattggcgctaatacaaatggaataaagaacacaggattcaatactagtggtgccccgaataaaatcggctcgtttacaccaaagaatgttggtacaactgatgcacgtccaatcgctttgtttcgtttagatttcgtcatccacataaacataaatggcacgaccaatgttgcacccgtaccaccaaatgtaacgataaacatttgtgtacctgatgtaataattttatctgcgtgttcaccagcttgaagcaacttgaagttcgcttcgatattcgcatatgtaatggctgcaattgctggctctacaattgacggaccatgaatacctacaaaccagaataaagcaaaggcaccaaaaataattgtgacaccaatccatccatctgctgctgtaaataatggttcgaataattttaaaataccttccgctacatttgatttgaagctgttgcgaatgactaaatctaatgcataaagaatgatgattaccgctgaaaatggaattaagtccttaaatacttgtgaaatattcggcggtacttctttcggcattttaattgtaatattgcgcttcacacagaagttataaacaataacagttacaaatgctgataagaatgctgttaataaacctttagttcccataaatgcacttaagaatccaccatctttggctggatcagaagctaagaacaagaatccacacatcgctgctagcattgtagaaataaagttaatttgatttgtactttctagcttacggttaaatgaatctgttaaagatttcgctgtcgttcctgctactaaaaatgctacaagccccatcgtatagttatatggtttcattaaaatggcttccatgcctttatcccatttaaaaccaaatatatttggcacatatgcaattaatagaaagatacttgagaataagatgacaggcattgcagaaataaatccatcacggatggctcttaaatatatgttacgtgataatttctcgaaaaatggcttccctttttcaatttgtgcgatcaatttttgcatcattgtcatcaccctcttttataaaattctaataaatgcttcattaaatctttcagtaaaattgttgtcattaaatggtcttgaccatgcatcatcgttacactgtatgcaatatcatcaccttgcgcttctttagccaacaggcttgtttgtgctctatgcgcttccgcaatgcaattgtttccttcttcaatcagtgcatctgcttttgcaaaatctccagcttgagctgctgttaatgcttctaaaaacttagaacgtgcatcccctgcaaatgcaacaatttcaaaacctaataattggacttcttctctattcatagcattaatccccttttaaacttattttctttgtttccaagatgtcgcagtatcttttaatactttatttaagtcatcgatatttttgaaaccagttgtacgtaaccattcacgagcagcatcttcaccttgttcgatgtatacttgaacagcaccagaccatgtagcacgtccacaaagtacaccattaaatttagcacctgcttcatgtgcaaattttaaagtttcttggaataattccgcagaaacaccagcacttaagtaaatatatggtaaatttgttgcagcatcttgatctttaaagtgttgtgctgcttcttctttcgtataaaccacttcaccttctgcaaatccttctacatatttcatgtttacaggtacttcaacttttaagacatcaacattaaagcgtgattctgagaataatttcattgcttcgtttacttttctaggtttaacttttgcgaattcaacgctaccattatcaggaatattatcgtcataagttaatacttctaagaagaatggaatgtcttcagctacacattctgaaccgattctttcgatatatgctttcttttgaatattgatttcttctgcatcgtctacatcatagtaaagtaagaatttaacagcatttgcaccttgttcttttaaacgttttgcagaccattctactaaacagtcaggtaaacgacctttagcatttacgtcatatccagttttttcataagcaagtaataatccacaatctttgttacgtgcatctgaagctggtaaaccatattcaggatctaataaaattgaagacgcatactgtgttaactcttccgcaactaatacttttaattgttcaatttgagctacagttggttcttccgtttgatgtttagccatcatgcgttttaaagcaccacgttggtcaaatgctaatgcagaaatgataccttcgttattacttaattgttcaattgatgcgattttttgattagattttgacattatttacacctctaaaacttcaatttgattgaataaatcatcataattatttaaattgacatatcctgtttgtgcttcttgcgcattcagcatgcctaatgtattagcttttttaagtaaatcatgatcattttcatgattgataattgctgaagtaattccagcaaccgtagaatcacctgatccaacaggatttaacacgcttattgtcggaatattcactctatagaatgtgttattgtgctttgcaaatgcaccttgtgcacctaaagacacaataatccactcaatcccttcgaataagggttgtgacactgcctgtttcaaactttctaaactttcatcaagtggctggttaagcaactgatataattcagaaatgtttggtttaatgactgttggcttataagggttttctaatactgtttgcaaagttgcacccgagcagtctaatatcacaggcacacctttgttttggcatcgttcaatgatttgtgcataataatcttgatttaatccttttggtaagctacctgaaatagcaactgcttcaactttttctagtaattgctcaaaatgtttaataaatcctgcagcctcttgattatcaatctccggtccctgctctaaaatttctgtttgttgtccttcatgtaaaattgcaatgcagtttcgtgtttcacccttaatgttataaaatgcatgcttgatgtcggcatgatctaattttttagcaataaattgacctaattcaccgccaataaaaccactcgcaaggactggctcacctacttgcgcaagtactcttgttacatttaaacctttaccaccagctgttttactcacttcttgaacacgattaacatcatctaatttcaatgctgttaatgggtatgaaatatcaacggatggatttaatgttaaagttaaaatcatatgtgtcgtcccttaatcgtggtattcgcctctgtcccatttttctaagaattcatcaaagaaatgtggatcagcttgatctgcattgcttgtttctaaatgtttaattttagcgattaattttttgttctcttcagttggtttatattcagcattaataaatgcatcgataatatcgcacattaataactcaccaataatacgtccaccaaagccaatgacgttcgcatttaattcttctttagcatataacgctgatgtcatatcacgtactagtgctgaacgaacgccaggtactttatttacagcattgttaataccaacacctgttccacaaatacaaacacctaagtctgcattaccgctaacaacttgttctccaacttttttaccaaaaattggataatgtgttcttgtgaaatcgtatgttcctacgtcaatgacttcatgtccttttgattttaaaaattcagatacacgcatttttgtatctgtaacaatatggtcgcatcctaatgcaatcttcatagtaatttttcctccttagcacattttattaagcatatctacgcggatttggtgtctaccaccatcgtatttaccttcaacaaaacctttaacgacatttttcgctaatgtgtctccaacaatttcagaacccatagtgatcattcttgaattgttatggcctctagtcatatatccagagcgttcatctgatacttcagcagcaatcatgcctttgatttttgtagcaaccataaagctacctgcaccaaatgcatcgataacaatacctaagttaccttcttgactttgaacatcttttgctacagccaaagttgcatcaacaaagtcaacttcctgtccttctgttacgtcaacaacatcatatttattgtctaataagtatgatttgatgacttcttttaatcgtttgccagcttcatctgaaccaataataatcgccataataagactcctttttactttaattttgaaatacctttcttaaaatatgacatgtttatttgtaggttatgaaaatcttgagaaaaggctttcaatttgattacgtttaaattataaacataaacaaacaataaatcaacacaatatgtttatgatttgtttgtttatgacatattttcaaacaataagtgaacattcatattgtggtattgttttaattaggtattcgtctgaaattgtagtaaaactttgtcgaggttcccgtttacataaatttgcataaaaaatagcccataaaatgaatgcaaattcacattcacttatgagcatatagatacatattttaacaatgcagttatatttttaatttagtcgactacttcaatatatgttttaatcgtttctactttttcttcatcttcataatccataaccactgcagtcaattcgtttaactgacaaaatgatgtaaaatcttctttgccaactttcgtatgatcgattaacaagtatttttcaattgaattactgagtgccagttgttgcgtataggcttcatctaatgtagatgtcatcacagcacctttatttactgcgttactactaaagaacatcttgctaaatcttagtttttccaacatagcattcgccatttcacctacaaatgcttctgtaatatggcgcatttcaccaccaattaaatacacacgaaaatgtgctgtttgtttttccaacaaaattttatacaccggcaaacaattcgtaataattgtgagcgtatgatgattgacttcttctgctaatagttctactgttgttcccggtccgaaaaacaaagtatccccatcttcaattaatgatgcagcttttctagctataaatcgtttttctgcaatttgacgggtatgtttttctttatgcgagatttctttatattgaaaggttgaattactgcgtgcaccaccatgaatcttcgttaaaatccctttgttttccaactcaattaaatctcttcgaactgtcatatcagacacatttaaaccttcgacgatttcattcgttcttatcgtgccctttttattcactagtttagcaatttcgtccaaacgttcatgtttattcaatgtaaaattgcctcctttatttaggcgatgggtcattatcctttatgtttagacatccattttaatatacatgcttattctataataaaaattgcgtaaaaactaatatattttaattgttcgattatatgtataattcatttttaaaaagaactgtttaaactgcgcctttgataatcgtaaaatgtatatactataataaaatcaaaagacaatataaatcattcattattttgatggggtgtttaatttggaaaatgatttagagacactaaaacattttatagatagttcgaatcgtatcacattttttacaggtgctggtgtatctgttgcaagcggtgttccagatttccgttcaatgggcggcttatttgatgaaatttcaaaagatgggctttcgccagaatacttgttaagccgtaattatttagaagatgatcctgaaggttttatcaatttctgccataagcgtttactatttgtcgatacgaagcctaatatcgttcatgattggattgcaaaattagaacataatcaaaaatcattaggtgtcatcacgcaaaatatcgatggtttgcactcagatgctggaagtcaacatgttgatgaattacatggcacattaaatcgattttattgtaacgaatgtcataaatcttatacgaagtcagatgtcattgatagaactttgaaacattgtgataattgtggtggtgccattcgaccggacatcgtattatatggtgaaatgttagatcaacctaccattatacgggcattaaataaaattgaacatgctgacacccttgttgtacttggttcgtcactcattgtacaacctgccgcaggattaatatcaaattttaaaggcgacaatttaattattatcaataaagaccgaacaccttatgataacgacgctactttggtcatacatgacgacatggtttccgttgtaaaaacattaatgacagagtaatcagtagattttttattactaaaatagactgtaaaaataatcgtcataaataatggcattttccgacattcaaatggtacaaagtacattgtcatatgcataatgatacctgtaattaatgtaataatagaaaagtgtatatatctcatatcgccacctgctatacaacttattagataattaattccaagacatattaattatctaattataaccttagttacgttattacataatataaaaatatataaaacttatttgcttgctcctttaactttttaagagtaaaaaataacctgaaacatagactttaacatccaagtttcaggttagtgtaatgtaaattatttactttgttatattatgattaaacatctaattctctacttgtaagtactttaatcatctctggatcagcatgtgagaaaaattggctattactttcttctaatgtcgcaatttgttgtttatcttcttctgtcagttcaaaatcaaatatatctaagttttgagccatgcgttctggattcactgattttgcgagtacaacaatgtcacgttctactaaccaccgtaaaataacttgtgcaattgatttgttatatttatctgcaatggcctgcaacaattgattttggaataattgatttttaccttctgcaaatggtgcccaagcttctaccacaacattttcttgttgaagtgctgcaacttgttcttcttgttgatggaatggattaatttctatttggttcacttgtggttgaatttgattgtgaatacctaaatctacaattcgatcaacgccgaagttagatacaccgattgctttaattttaccagtttcttttaactcttctaatgcacgccatgagccatatacatcattgtaaggctggtgaataagcactagatcaatatagtccaaatttaatcgttgtaatgatcgttcgattgatttgatagtatcttcatagttaacattttcaatccatactttagtcgtaatgaatagttcacttctatcaatacctgaagcttcaataccttgacctacttcagtttcatttaaataactttgtgctgtatcaatatgtctataacccgctttaattgcttctttaaccgcttctgctgtttgttcttgaggaatttgaaatactccgaaacctaatactggtatctttacatctttacttatttcaatatgattcataaaatgaacctcctttttcttgtaagctcactataaaccatggagttaactcgatagcaagccataggtttactttctctcccaaatacgttcaacattggcatcatgattatcgctagcattgattttagcaatatgattatcataattatcaattttatattgtagtaaatctctcgcatcatgaattgtctttaagttttcatttaattcttcgagttgcttatttaaaatttgcttttgctgtgcttgaatattttcatttttaggaagctgcgctaacctacaaaattcgataagcgattcaatactgacgcctgcatttcgcaaatttttcactaaataaatccaatttaaatcactatcattatatattctatatccattttcatctcgattaacaggtggaatcacaccaaccttttcataatatcttaaagtgtcttgagatatattcatgagcgctacgacttctttagttttcattgtgactatcctttcagttatgtttggtcgtctaaagtaatgttgctttatatattgccatcttcgtttgaatacttcttattttattactcaaatttaaatttgtctcttttttaacattttacatttcatcgtttttaattactttaaaaattgtataacttaaatatttaaaatgatataatcactaagattgataatatttaatttttaaaaaattattttcgttgcaatttttgggtgattcggaaaatttgggtgatcgattgtttatatacatcaacatgctttgcggattgtttgagagtaaacagttatttgtatgcattaacgaattttgaaaaattgaatcattatttaatcagattattaattgcgcacgcgcaacacaaaaaggagacatgtcaatgacatatagaatgaagaaatggcaaaaattatccaccattacgttattaatggccggtgtgattactttgagtgatggtgaattcagaagtgttgataaacatcagattgctgtggctgatacgaatactcaaacaccaaattatgagaaattgaagaatacatggctggacgttaactatggttatgataagtatgatgagagcaatccagatatgaagaagaagtttgaggctacggagaatgaggcaaagaaattacttagtgagatgaaaactgaaagtggaaggacttatttgtgggaaagctcaaaagatatagatacgaaatctgcagatatgactcgtacctatcgtaatattgagaaaatcgcagaagcgatgaatcatcctaaaaccactttaaaaaatgacgaaaataagaagaaactgaaagatgcccttgagtggttgcataaaaatgcctatggaaaagacccagataaaaaagttgctgatctgaaaactaatttctcaaaatcagcacctcaaaagaatacaaacttaaattggtgggattatgaaattggaacacctaaatcattaacaaataccctaatattactgaatggtgatatttcaagtgatgaaaagaaaaaatacactgcccctatcaaaactttcgccccaaaaagtgatgaaatattatcttctgtaggaaaagctgaacctgctaaaggcggaaatttagtagacattgctaaagtaaaacttttagaaagtattatcgaagaagataaagatatgacgaaaaattcaatagattcatttaataaagtgttcacttatgttcaaagtaattcaactggtaaagaacgtaatggattctataaagatggctcatatatcgatcatcaagacgtcccctataccggtgcttatggcgttgtactcttagagggaatttctcaaatgatgccaatgataaaagaaacaccttttaaagaaactagccaaaatgatactattttaaaatcatggattgacgacggatttatgccactcatttataaaggtgaaatgatggatttatcacgtggtagagccattagccgagaaaatgaaacgagtcactcagcatctgtaacagtaatgaaatcattgttgagattaagtgatgccatggatgagtcaacaaaagctaaatataaaaaaattgtcaaaacttcagttaaatctgattcaagttataaacaaaacgattatttaagctcttattcggatataagcaaaatgaaggctttaatggaagacagcactctttctactaacgatttaacacaacaacttaaaatatataatgacatggatcgtgtcacctatcataacaaagacttagactttgcatttggcttaagtatgacgtcgaaaaacgttgcacgttacgaaagtatcaataatgaaaacctaaaaggttggcatactggtgctggaatgtcttatttatacaatagcgatgtgaaacactatcgtgataacttctgggcgactgccgatatgaaacgtttagcaggtactacaactttagataatgaagaacctaaagaaaataagaactccgataaaacttttgtaggcggaacaaaattcgatgaccaacatgctagtattggaatggaatttgaaaatcaggacaaaactttaactgccaaaaaatcatatttcatattaaacgataaaattgtcttcttaggaactggcattaaaaatactgattcatcaatgaatccagttacaacgattgaaaatcgcaaagcgaatggatatacgttatatacagacgataaacaaacaaccaattctgataatcaggaaaccaattcagtctttttagagtccacagataccaaaaagaacatcggttatcattttttaaacaaatcgaaaataaatgtaaaaaaagaaagtcatactggtaagtggagtgaaattaataaaagtcaaaaaacagaagacaaaaaagatgagtattatgaagtaactcaaaagcattctaattctgacaataaatatggatatgtgttgtatccaagcttatctaaagatgtctttaaatccaaagcaagccaagtaactgtcgttaaacaagatgatgacttccacgttgtgaaagataatgaatcggtttgggctggtgtcaattatagtgatagcgctaaaacttttgaaattaatggtactaaagtcgaagttaaagccaaaggaatgtttattcttaaaaagaaagatgataaaacttatgaatgtagcttctataatcccgaatctacaaataccgcttcagatattgaatctaaaatttcaatgactggatactctattacaaataaaaatgcatcgactactaatgaatccggcgtacgctttgaattaactaaataagcaagaaaatctcgagcttgggacataaatcaatgtcctagggtctataatattatattggcagtagttgactgaatgaaaatgcgcttgcaacaagcttttttcaactctagtcaaccttgccggggtgggacaacgaaataaattttgtgaaaatatcatttctgtcccactcccaagattttataagcataactatcattcaccttgtaatccgcagaccacatcacctttgataagttctcgattatttaaaaatcgaatttttaaagatgtacatgcttcaatattcttatcattcattacttgaaaatgtatatgaggttcagtagaattgccagaattcccaaccttcccaatgatgtcaccatatttaacattttgtccctcattcacaatgattgaatattgttgtaaatgagctattaagctatactcattttctgcgtgcttgattacaatataatttcctaaaaactgtgattcattcgtacttccaatactgttgtcttgaaccccattcactactttttcaactgtaccatttgctggcgcaatgatatcttttccaaaacaaaaataatcagtatttacttttccttgcttcttatatgttttatgattttctttaataactaaatcaatagcatacctttgatgtgggtataaatagtgataattatataattcattatctcccccccaaaaaacctcatagcaatctgttgtcggcactgcgtattttaaagtcgtttcattcttaatcgcatcataattgattaacggacgcataacaaatccgataatactattatctttccaagtcactgacactccaaattgctttgctttatctatccatatttgctccatagtatcatcattttgagtacacacttttaactcatgtacatcagactgccttgtataagatttgaaaagtttcctaaactgccaataactaaactctcgcttcaaattttgatcaaaaatcttatatattttcctgctcttacttttatttaaataatccccaaagtttgttttattcatatattcttatcctcttatatttattttgatatcaattatttctccagttcctgggtcatttttgcgctaccttatatttttttcttcccctggaaattttgtgaatttgcttttttacatttctcgtcgaatatgttggaatgaataatcacgtttttttacatcatcctattcgcttttagagacacaaaatagctctcacatcttcgttgcgtgaaccttgtggaagtttttgtctataaaatcgaaattgctttttattctttattaaagatgtgcataacctttttttattatattttcttcttctaaagctttaagtctttttgttagattcacatcattttccaattatctgcaaaagcatttcccctatttttataacatttagttaatcactttgctattttttgaataggaatttaaagacaccttaagacatcagtaacatttatacttgatacaacgagttgtattacttccatcttaaagtatattcatattttctcttagtcataacggtcagtcctacaatttgaaatttttattgcaacttattcattgacaatttgctgtattcgataatcagtttaccatcaataagtatttcaaactgaaaatttttaaatagaaagaatctagttccccataataaccttttaatgctttattacagtatttatctttagtagcttttaaagtatatcagttgaaaagttccaacaacattgacaatcaacctaataaataagagaatataattgcgcataatctaaaatgttataaataataaaatagtattatctatttactcagataaatagatgggcgtcaaataaaattttaatgatggagaaaacagggttttatcaacatgacatttaatgagtataattacaacaatgaattaatattaaagttaaacaagattgaagtacaaaaaaataacgaaaaaatttctgaggtttttaaggattatgaaatattaaagcccaaaattgtttttaatggctctaatccttatttagcattaaatcatattatagttgctgaaatagaaaattacagttctttagaaacgttctccaaaatatatgtagatgaagattactactataattacggagaattaattatcaagtgcaagaaataggaggaaattatgactacttatatgttaatgtattcaataccagaaaaagcaggtggtataacatcagttatgttaaatagatctaaacttttagctgaaaaaggctattcatgtgccttattaactttggatgacaaaaactatgatccattaagagctaagctaacaaattcaggacggttacataaagaagtaaaaattgttaacttatacgaagaattgaagatgctgtatgatgttgaaaatacagaaatcgaaaataaaaatatgcaaacatttgaaaaattaaatcttttaaatcaagaaggcttttatattcaaaaagacgaatatgaagaaaaaaagtatgccaggtactttaaagataacaattacataatgtataaaaaatggataaatggtcaattatcacacattgattattttcaaaatcgaaaacgcattaaaaggcatgtttttcaaaataaaatacttcgaaaagaaataactttcaacgataaaaataaaatgagtgaagttaaatatttatcaaatgacggcttttgttatttatcatattggtatggggataacgaaaatatagtcaatatattttattttgataaaaatagtaaagaagtattaaactttaaaaacaataaaatgttccactcatattggttggataaaaacttaacttcaaacgatgtattaatactagacggtataggcacttatcctaaagtagagaacatgcagaataatgatgtcaaaaaaatatttactatacatacgaatcatttcttgtccccttactcttatggcgctgagattaaaccagagttcagaaacatgttactaaaccttaaagagttagatactttagttgtattaactaaagaacaaaaagatgatattataaaacaatttggtgattacaataatataaaggttattcctaatgctgtatcttttgaagagaatttaacacaaaatattcgagaaaaaaattctattattgtattacaaagatttgtagctatgaaaaatatcacacatatcatttccgctataaatattgtaagaaaaaaagtaaaggatgttaagttgcacatatacggtaccggtacgcaaaaagaaaattacacaaaacttattaaaaaacttaaattgcaagataatgtgttcatccatgattacgcatttgacatacgtggtctttatacaaaagcctctctaagtgtactgacatcagattatgaaggtctccctatgagtttactagaggccatgagttacggtgttccagtaatttcatatcctattaattatggccctaaatctataatccaaaataatataaatggaataataacaaaaaagaaggataatattaatgaattggcaaaaaaaataattcatgtattaaaaaaagaaacattgatatctcagttttctgaaaatgccagaacaacaataaaaacaaacttttcttacgaagcggtatccaaaaaatggattgaattaatcgatgaaaaaagcaaatagagaacaaagtcctctatatcttcaaaagtatcaatattaaatgtttatttaatttacaaagtgttcaaatatattgattaaactatgaatcgtctacacttagttggacaaatcaacatataaataattttttaaaactaaagtgtagtcgattcaccatattttctaatcatccctcaaattttaatatttttatttaaaaaatgtactcgatactcaaccaatcaataatcatacttaccttcaacaaattctttaacatgcagtgttatcccttgataatatggatattttgttaatctaaatttctgctttaatgcttcatctctactattcgacatcaaatatgcatgttcaagatagcttaaatatgcttcgtcattgccactatctccaaaacctaatattgattttactggtatattatatttcttcatcagaaattgagtagcatatagttttccagcatttgacggtgtgaagtcaatatcatacgcattttcaggatcaccagctaatggattgcttcgactaaatctcgctgtatagttttgatcatttgcgtatctgacaagtgattctaggatacgcctatctttgttgtgattacctattgaatgaaaataaaaattataatgtgtttcattaccttcaaatgctctttgtggaataaattcgacattatattgcgcagaaatatgacgtaatatatcctcaatatcttcaaataaaaatggttcgctcaagactttctttttatatgtttctgattcaacatattcgccattattccaagtgaacattttagaactcaaatcagaaaagatatgtaatggtttaaacgtcatattaacttgatccattttatccatgacactttgaaatgtacttcctgtcaacacagcagtcatcacttcattattattagttagtttttccaacaatttttccatttctcttaaatgacttaaatcttcttcatttgtattatgtttaaaatatgtttcatcaaaatcaaacaataatagacgctttgacatactcattcccccataatattttaatgaatttatctataacttaaatacactataagtctcaattaaaagtataagatcgactatatgcttttcatgattattatatacaactaatgaatccctataaactaaaaacattgcttaccacttttcaaaatacatgggtcatatccctcgttaaaaactattactaaaaatcaaaaatataaaaaatcaaaaagtatgttttaaactttataaaacgtgttatataaatagtgtaatataccacaactttaaaaggagattgagatatgaaactaaaatcatttgttactgccactttagcattgggattattatcaacggtcggagctgcattacctagtcacgaagcatctgcagatagtaataacggctataaagaaatgacaatggatggttatcacactgttccttacacgatttcagtagatggtattactgcattacatcgaacttactttgtttttccagaaaataaaaaggtactttatcaagaaattgacagtaaagtaaaaaatgaattagcttctcaacgtggtgttacaacagaaaaaattaataatgcgcaaacagcaacgtatacacttactttgaatgatggtaataaaaaagtagtgaatctaaagaaaaatgacgacgctaaaaatttaattgatccaagtacaatcaaacaaatacaaattgtagttaaataataatttgaaaatgaaaatagttataccaggcaaacgctgaaaaattgcgtttgtctttttagttattgaacttgtaaattattgttgtttgcttctcctgataatagattggcctatacaattgtaaattcgatatgaatgtctaccataatttattatctaaacataacagcaaatctcaaatatctagaacacaaataaatcccctcactaccgctaatagtgaagggatttattttattacttagacgtatgctctatgacagacatgtttaaccgtattaatcaaccatttatcattgctaaatttccaaatcgaacattatgaagtcaatgcttcaatttttataatccatcattacatttctgcattcattattcagcttctctaatttcatctgaaatatctttatagtcaatatttgcattagtgaaatcttcatcatgaattggaaaatgctgttcaaatgtttctatattttggatttctaccttaacatcttctacttcaaaatctaagacatgtccgccaaagttacgatcatcatttgcaaagtgtacatggaatcctgctgatccgataccatggaatagttctggtgtaaagaacccaacgactgaacctttgacgtatgtttcagtttgttcaggttgtcttctagctgaatcaattaaacgtgtataaggtggctcttgtgccggcatcatacgtatatgcatttttttaaataagcctgaaatttttactgcagaaaataaattttcactcaacatcttttccttaatttctgcaaaaactgcttcagaagatttatctttcgtttcatagcttgtatctgctacgaatttagttacagttgcatacggtgttaactcgtcaccttttaattccacaaattctttatgttcatttgcatgataggcttttccatctaaaaagatgacctcaccatttgaacctgttagtgtagcgatacctaaatcaccatgttgcaataattcatttattgatgcagttccttttaataatcctgccattaatgtgcctaatgtaccatgttggtataaaacattagtcataaaatctcccactcctctttaacatttatctttattttagttaaatacgtcaggtaacatatttgttgaaagtttgatattatctttgtaatttacaggtatatcaattaatactggaccatctgtttcatagccctctttaattgccgcttctaattcttcttgattagtaactcgtaaaccttttgcgccaaatgattctgcatattttacaaaatctacaggaccgaagtctacacctgatgaacgtttatatttcatttcttcttggaattcaaccatattatattttccatcattccaaataagttggataatgtttagatttttacgtacggccgtttctaaatcttgtgatgaaaataaaaagcctccatcgccagcaacggatacaacttgcgtattagggcgtacaagagcagctgaaattgcccatggtaatgctacaccaagtgtttgcataccgttactaaataataaatgtcttggattataacttctgaaattacgtgccatccaaatatagtgactaccaacatcaactgttactgtagtatcatctgttaataccttttgcatagattcaataatttcgactggatgtagaataccttcttcatgtgtcgctttaataccagtttcttcatcaatatgtgttcttagttgttctaattcatctaaatgttgttgatttataaatggttcatccactttttcagaaatcatttcaatcgttttagcaatattaccaatcaattcttttttcggttgcatataattagtaatttcagcttgaacttcgtcaatattgataatttgtgtttctaattctttattccagttactagcttcgtattcaattggatcataaccgattgtaacaactaaatcacttttacgtaataattcatcaccaacttgattgcggaataagcccacacgtccgaagaaatgattttctaattcacgactaattacacccgcaccttggaatgtttctacaactggtaaattcgtgcgctcaactaatttgcgaatggcatttgtttcgtctgcacttgaacttctcataccagctaataaaacaggaaatgatgcatttttaatcgcttcaatgacatcattaatatcttgttcactcggtactcctaaatttggtttttggcaaagtgatatcgctttagattcaactggtgaagaaatcacgtcttgcggaatactaataaaacttgcgccattttttcctgaagtagcaattcgaattgcatttgtcataacttctgataatgattcaggatcttgtacttcttcactgtattttgatgaatattttaatagcgcagcattatcaatactttgatgcgttaatcgtaataaatcattacgtttcacttggccacctaacgctaatacaggatccccttcagatgtagctgttaatagtccagtcgttaaattacttacaccagggccacttgtaacaagtactatacccggtttgcctgttaatcttccaataccttgcgccatcattgcggcattttgttcatgacgcgtgacaataagttcaggaccatcatcaattaaagcattaaatagatagtcaatctttgcacccggaataccaaaaacatattctaccccattatttttcaaagtatcaataacgatatcggctgcagtgtactttttatcagtcatttatattcatttcctttcaaaatgtgttgtgtagatgtgtattacatgtaattgtattgtgatttgtaatctaatgattgttacgcaaaattaatgatatttatcaaaaatttcattatacgattagatttgtaatacataaaaattgccttcagtacattatataacctttgttagatgaataaaaatcgttatttgtaatactaagtattccaaaaatgcatgagtagattttgtgcagtgtgattatgagggatgttggattgattggtgtgaaggattgttacaatgtctttgagtttggtatttagtcgatggcggtttgaaattgtcgttttatggtggaatgaatttgtcgttttatggagatataaaaatgctgttttatggcagtttcaaaatggtgtttcgattaaaaagtcacagcaagacttagaactaactgtgacttatacatttcatacttatatttatcgattggttttatagttataaatgatagaagcagttcctaaacaaattaagaagataatcattaaatatatagaaaagttatctgttttaatataaaacctaaaaagtagaaacaccagcatcgcaacaataaaataaacaggaataaaagctttcttccaaaatatagaatctttcaattaagtcactccttattttgataatactcttaaatcatggatcttgagttatcttccggttttcatccgatagccctttcccttgaaccactatgattagaacattattatccgcccctcccgcaagctaaatgacaatttaataatgtacacttttgattatgtaagcatgtacaaattatacgtgtaaatcaataattcatatttgaatttattctattcctgagacattaaataaaggaaagttcatttatactctacacatttcatattccctacacaaacgcaaaaaaacacctcgacataacatcgaggtgttttgtatatatcgtccgacaattaacgttttgagaattgaggtgaacgacgaactgctttaaaatttggttttttacgttcaaaaaactttagggtttcgtacaattgtatagactgtcgtaagccttgatactaaaggatttctaatttttccgattgcatagtattgcaccaaatatcactcaggggtaactaaagggtaactaaagggtaactaaataaactgctgtccggttgtatatactcttgtatcgtccggttatcgtccggtcgtaaatatattgatttatcaatgtttttatgtatatcaataggttatcgtccggttatcacatgatgtatttattagcctctaaataaataatatctagtacctggacctctaccttcggatccgataatttctaatttctttagttcagcaattaactaagatgtataaattttttcgaagtcatattgtttcttgaatttcaagtctacttgctaacttaccatctgataaaaattctacaatctctgtcaacttctgattagtaggtattttatttaacttgtaattcttattaaataatactactcgaaaatccgcctctttactcgaaagctcacaaaacccttgatatcactggtttctcatgattttttaatatttttcttttgagttactcgaaaatttttctctttactcaaaagctcacaaaacccttgatatcattggtttcccatgatttttaatatttttcttttaagttactcgaaaatttttctctttactcgaatccgagtaaataatatgttctctttggatcattcttacttgatccatgtgtcgatataatattcatttcctctaattctttcatctttttctagcagtaggaacagacctttgaataatattagcaattttagatgctgttagttcgccttgattatataaatgtctcacaattaattcttgttgctcatttaaactttcaaataattcaggtgttattatattactcactctccctgtttctctttttttccttgctattatgttattcttcaaagctagttgtactgaactattattaggctctgagtatacaggatcatctaaaaaatattccttcatttcgtcaaatatacgtcccacgccctcatttgattctctcacccatttatattgagttaatgctgcagctaattttggattccttgaatatctttcttctttaatattctctaacgtaacagaagcaggcagtgcacccgggctactaatttctaatctgtcgtcaaacatttttattcttatatgatcgccttgattatcatatctgcgatgtacaatagaatttatcattccctcaaaccaagcaaattctggatattctggcaaagttacaaatcttccctctttacctaaaaaagtatattcacgtaattgtgtattgataaaggctctcgcttctcttattgctactggcaaagctttatcaaaagtaatatcttttacaatgttaagtcttgtcccagattcttcttttgtaccttcatacctcataaatcgaattctagcgcctggtaaataaacattgatgttattactaaacaataacaaacctgcaactgtcaatttaccttcacgcataaatcctctagcttttaataatttttcattatctacgtttgtattaagtaattgcttaaattcatcaactagttcttcattcacatcttcaatactagaatactctactaattcttcttcgaatcttcgtgaaccacggtcgtattctagatttgtaatttgattgtgtgtcagttttctacttttatcgttaatccttaaatatactgaatcatcttttaaggtgattatggcatcataactgggttcaatgtcgaaaacaagaatttcatccatagttccatcgcgtttcttcacttctattatttcatatgtatatttaggtattctatataaatgttcgaaaggtgcttcaatataaacctctttcttttttgcttttgaatgattaaatcccgaaatttctccattatcttcaataccaattaccagtttgccaccttcagcatttgcaaacgcactaatgtgttgagcaacatctttaggatttatagatgccctctttcgatctagaagctgtccttcaacctcagtttgcaaatattcaatatacttactactagtcatatataaacctcgcaatctcgcatcttattgactttattataacattcaatacgatatctatcgaatatcattacaacctctatctgcttgtcgtacgaatcccaaagaaaaacaaggtcatttcatatggtttcataaagtttcatatcattgaattttaagcagaattgaaacaaattagttactctaggggtaactaaatggtatctaaataactctataaaaatacaaaaaacactctttggaataatccaaagagtgttgtaaacgtttcttcagttgaacacaaattgctgccgcaatttgcgaactccatctgtaaacgaacaagttcgcaacagctgcagcttaacgttttgagaattgaggtgaacgacgagctgctttaagacctggttttttacgttctttcatacgtgggtcacgagtaagtaatccagcgcgttttaaagaacctctgtattcaggatctgcttctaataatgcacgagcgattccgtgacggatagcttgagcttgtccagtgaaaccaccaccatgtacgttaactaaaacatcatagttacctttagtttcagttacatcaaatggttggtttaagtctaaaattaatgattcgaatggtaagtattcgcgtacgtcacggttattaactgtgatgttaccttcacctggtactaaacgtacacgtgctactgagtttttacgacggcctgtgcctctatattcaacttgtgccaaagtcatttcctccttctaattaaccacgtaattcgtagttttctggttgttgtgcagcgtgtggatgttcagcgccaccatatacaaataattttttaccttgtttttcgcctaaacgagtgcttggtaacatacctttaattgagttttcaattaaacgttctgggttagttcttcttaattcaccagcagtgattgatttgataccacctgggtgatttgagtgacggtagtatactttgtcagtttctttgttaccagtaaattcgatttttgatgcattaataacgattacataatcaccagtatcaacgtgtggtgtgtaagttactttatttttaccgcgtaagatagatgctacttctgatgataaacgacctaatgtttggccttcagcatcgataacataccatttgcgctcaatgtttgattcatttgccataaatgtttgacgcataataattgtcctcctaaaaaataaatgcttctattcaagctataaacagtttcataacctaatagatgatttcatttgtttcatttttaaaacgtttaatttcatttattttgttaactgttgttcgtttctgcttatatatcttgtaacacaataagtttccggggcttatcgtggggtggatataaaacaataccgttaataatcttataatttcacaagctttttgtcaatggcaatcagtcattttgtaatgattttttacgatgtatttttatatcgttgccaaagtcttttaataactcattttcatctaaataaatcttctctaaatatagtccttcagccggtgcagtaaaaggtacattcttacgattctttgattcaagaagcttcggcacatcagaaatttcatgtcgtccttttccaacttctattaaaaatgcaactaagactcgcaccatgttatataaaaatccagatccagtgacaatataatcaaagccatcatctgtttttacaatttcactttggtataatgttctaactttgctttctacttcagttttttgcgaacaaaatcccgtaaaatcatgtgtacctatgaattgttgcgccgctttgttcattttgtctaaatccaacgtttcaggaataaatgttttcaaaccactttgaaatggatcgcggtgttgtgcttgatatactttatatcgatagcgtttaccgacacaatcgtaacgacaatgaaaatcgtcatcgactgtaactacattgttgacataaatatcatcaggtaacgttcggttcattgcatattgccattgtgacataggtatattcagctctgtgtcgaaatgaaagtattgctgtatcgcatgtacacctctatcagtcctacttgaaggatggattctcacatgtcttttatgcatgcgttgtaatagcttttcaaattgttgctgtaccgtacgtccattttgttgaatttgaaaacctagaaaattatttccttgatacgcaatttctactaatatacgcatgaatttacactcctgaatattttaatacgaataaaataattgcaattgggattatcatgattaaagataacgtatctctcaattgccatttaagctgtctgtagctcgttctttgaacattggcatcataacccctaacttccattgcgaccgctaattcttcggcgcgttggaaagctgagatgaatagtggcactagtaatggaataaatgatttaatacgtgttgcaatgttccctgaactgatttcagaaccacgcgacttttgcgccaaaatgattttatctaactcatccattaacgtcgggatgaatcgtaacgcaatagacattatcatacttaattgatgaactggtaatttaaacatctttagtggtgcaagtaatctttcaaacgcatctgttaaatcaattggacttgtcgacagcgtcataatcgttgcaatcatcacaataccaattaatcgtaatgatatatatagcccttctaaaataccattagtttcaatcgtgatgccatgccattcaactaatacatatccacctttagttaaaaatatatgcatcattaatgtgaagattaaaaagaaaaatattggcgttaaacctttaattaagaaccataattgaatttttgctaatctcataaagaataatataagtgcaaacacccaaagatatgttaatggtgaatgacagacaaatattaatataataaaaagaaaaacaaacattaactttgctcttggatcaagatgatgaacataggagtcatttggcaaatatcgccctataatcaatttatttttcatgttgccactccttatacaagctaacaaatgcttcttcagttaaggcaatatcttttaactttgtttgatgtttttgttcaaagtcatattgtaactgaacgatgtctggcaacccaatatgccaccccgccaacttttctttttctttaaagagctcttttggtgatgtttgcgacactatactaccttctttcataacgatgacttcatcggcataacgcgcgacttcattcatatcatgtgaaattaggataattgtcttattttcatctgtttgtaaagattttaataagcgcataacttgtcgtttgctttgtgggtcaagtccagctgtaggttcatcgacaacgataatatccggattcattgccaacactgatacaattgcgattttacgcatctgtccacctgacatttgaaatggcgattgtgacatcacatctcttgaaaaaccaagatccatcaataaacgatgtgcataatttttagcttcatctaaatccattttaaagttcttaggcccaaatatcatttcacgttctactgtatcttcaaacaattgagattcgggaaattgaaagaccatgcctattctttttcttacaggtctaatatatttatctttagtcttatgtgttaccgtaacatcatcaattgtaactgtcccactagttggtttaatcaatgcattaatattttgaatcaacgttgatttaccactacctgtttgtccaacgattgcatagtacttgccttgttcaaactctgtattaatatcatgaatagcttgatgttcataaggtgttccttgttgatacgtgtaactcacatcattgaatcgaatactcatagttgattcaccaacccttcataagttaagaatgatgtttggtgtcccagcatttgatttattttgattgggaatggcaaatctagacctattgttgttaactcttctgcatggtcaaaaatttcaatcgctgtgccttctttatagacagtccctttattcataacgataacatgatctgcttccatcgcctcagataaatcatgcgtaatagaaatgattgtaatattatgttctgatttaactattctcactaaatccaataaattttgacgtgcatcaggatctaacatagaagtcgcctcatctaatataatgacagaggggttaagtgctaatacacttgctatagccacacgctgcttctgtccccccgataatgcattaggttcataatctgcacgttctagcatatcaacttgtttaagtgcttcgctgactcttctgtgcatttcgtcgtgtggaaccgcatgattttcgagtccaaatgccacatcgtattttacaattgaaccaacaaattgattatccggattctgaaatacaattcctatgtcttttcttaacttttcaaaattatcatctgttatagtttgattattataaaaaatttctccagatttaacgttctctatgccaatcattaacttggcaattgtagatttcccagaaccgttatgaccaacaatagatgtccactgacctttaggtatattaaaagaaacatctttcaatgtgaaggatgcatcactttgatattgaaatgaaacatttttaaatacaataactgaattcttatcctccacttgtctctctcctttacgattcgtgtatctatcatattttacaatatttataaatcgctgtatatgacattgactgggtttgctatatattactagtattttccgactcatttctagtctttaaagtgttgtttaacaactaatgataaggacatttattcctctctaacaattatgtataaacgttaataaaataaatgatttactaatatagggtaggccgcgtttgattcaacaataatactttcacttcattcagttctagtgaaattgatcaaactagtttgatcatatttttagattcggactcaaaaaagtagatataaagaaatcggacttgtaaacatttctgttcataagtccgatagcttatacaataaaaaagcgcgcaccccatcataagtttgttgagttcacgctttaaatctttatttagttgatggggtactctgagctagacaatatttgtatgtggcaaacattatcgttgcactcatttgctttatataaaagtagttagtgtatttatataaattgttatactaattcgataattactgattcagcaccgtcaccgcgacgagggccttgtttaaggatacgagtgtaaccaccttgacgttctgtataacgttctgcgatttcaccaaataatttttgaagtgcagtttgtgtagtttcatcttcgtttaagatttcaacattacgtaaagttttagctgcattacgacgagaagctaaatctccttttttacctaaagtgattaatttctcaacaacactgcgaacttcttttgcacgagcttctgtagtttcaatacgctcactaataataagtgatgtagctaagtcacgtaacatagctttacgttgatcagaagtacgacctaattttctgtaacccatgagttaacctcctttatcaatcttcttttcttaatcctaatcctaaatcttctaatttgtatttaacttcttctaaagatttacgacctaaattacgcactttcatcatgtcagcttcagatttgtcagctaactcttgaacagaattgattcctgcgcgttttaagcagttatatgaacgtacagataagtctaattcttcaatagacatttctaatactttttctttttgatcttcttctttttcaatcatgatttcagcgttttgcgcttcatcagtaagaccaacgaagatattcaagtgttcagtcattatttttgctgctaatgaaactgattcttgtggtgtgattgaaccattagtccaaacatccaatgttaatttatcaaaatcactgctttgacctacacgtgtattttcaacagtatagttcacacgttcaacgggtgaatacaatgaatcaacagggattacaccaattggtaaatcactagtattattttgttctgctaatgcgtaacctctacccttgttagcaactagacgaatttttaagtgaccacctttagatactgttgcaattttaagctctgggtttaaaatttcaacatcactatcatgtgtaatgtcgcttgctgttacttcgccttcatcacgtacatcaatttctaaagttttatcttcttcagagtaaattttcaatgctaattgttttatgttcataataattgtagaaacatcttcaactacattgtctactgctgagaattcatgtaaaactccctcaatttcaatatacttaacggctgcacctggtaatgaagatagtaggatacgacgtaaggagtttcctagtgtagtaccgtagccacgttctagtggttcaacaacgaacttaccgaatttagcatcttcactaatttcaattgtctcaattctaggtttttcgatttctatcatttaaatatcctccttatatacgtcgacttaatttaaaatgtttgctcagtgacctgtaacaataccatcataaattatacacgacgacgttttggtggacgacaaccgttatgaggtactggagtaacgtctctgatcgcagttacttctaaacctgcagattgtaatgcacgaatagctgattcgcgacctggaccaggtcctttaactgttacttcaactgtttttaaaccatgctccatagctgatttagatgcagtttcagaagccatttgtgctgcaaatggtgttgattttttagatcctttgaatcctaatgcaccagctgatgaccatgataaagcattaccgaactcatcagtgatagttacaatagtgttgttgaatgttgaacggatgtgtgctacaccattttcaatattctttttcactctacgtttacgagatacttgtttacgtgccatttaaaatttgcctcctttacctattattttttcttgttagctaccgttttaactggtcctttacgagtacgcgcgttgtttttcgttttttgaccacgaactggtaaaccacgacggtgacggataccacggtatgatgaaatttccattaaacgtttgatatttaagttagtttcacgacgtaagtcaccttcgactttataaccgtctacaacttcacggatgcgacctaattcgtcatcagttaaatctttcacacgagtatcagctgatacgttagcttcttcaagaattttttgagcagttgacgtaccgataccgtatatataagttaatgagataactacgcgtttttcacgtggaatatctactcctgcaatacgtgccatattaatttacacctctcttttattaaccttgtctttgtttgtgttttggattttcacaaattaccattactttacctttacgtttaatgactttacatttttcgcaaataggttttactgatggtcttactttcatttttatacctccctatattatggagtgacgattatttataacgataagtaattcttccgcgtgttaaatcgtacggagacatctcaacagttactttgtcgccaggtagaatacgaatgtaattcattctgattttaccacttacgtgagctaaaatctcatgaccattttctaattctactttaaacattgcgttcggtaaagtatctaatacagtaccttctaattcaattacatcttgtttagccattgattaacttccccctttttgcaatagtaaggtaatcgtcaatagacaactttattgttacgaatctatcagtgattaattttataagttaaacaaaaattacgggaattaattatcgttaattgccactctcatctatctaatatgattaaatcatgcctcacttaaaatagaccgctaaaagttgatctattacaaatgatctaaaatatcaatgacatctttggtaacgtcgctaatatcttttgaaccatcaatatttttcaatacacctttttgatcatagaaatctaaaataggcttagattgtttaatattaacactcaaacgattagctaccgtttcaggattatcatcttctcgttgatacaatttaccaccatcgatatcacaaataccttcgaccttcggaggattaaatacaagatgatacgttgtaccacatgactcacagattcgacgacctgtaagacggttcattaattcttcttccggaacttcgatattgatgacagcatcaatgtttctgtcaagctcagacataatattatttaatgcctcagcttgctcgattgttcttgggaagccatctaataaaaagcctttttttgcatcgtcttcagaaattctttcctttacgatacctacagtcacttcatcaggaactaattcgccacggtccatataagacttagcttctttacctaattcagtttcttcttttatagcttttctgaacatgtcaccagttgaaatgtggggtattgggaatttcttgacaatttcacttgcttgagttcctttacctgcgccaggtaaacccatcaaaatgatattcataagtgccctcctaaaattatctaccaccaaagcctttatattctttttgagatacttgagcttctaaagatttcattgtttcaatcgctacaccaataacgataagtaaacttgtaccaccaatctgaattgattgtggtaatcccataaacttagttgctaatatcggtagaattgaaataacggctaagaagatagaacctacaaaagttaaacgatataaaactttagtaatatattttttggtttgttcaccaggtctaatacctggaacatagctaccttgtttcttaaggttatcagccattttttccggattaacttgtacaaatgcatagaagtatgtgaatagtatgatcagtacaatatatacaaccataccaacattacttgaaggatttgcagcattcgcaatgttttgtgcccattctttatctggatagaacaatgttaatgttctaggcagtaagaagaacgccattgcaaagattacaggaataacaccggctgagttcacttttaaaggtagatacgttgcttgtgaacctaatctttgagcagtttgtttcttagcatattgaattggaattttacgaacggcctcaagaacataaatagcacctacagttaatagtatcagtgacactaatagtcctaatactttcaaccatgctaatgacgtatcttcttgcccaacgaaagcactttgtccaaattgaattagacttgctggtaacgttgataaaatacctgcgaatatgataatagaaataccattaccaacaccgaactgagtgatttgatcaccaagccatattaagaaagcagttcctgctgtcaaaactagtgctattaataaataactcataattgactgattaataatcagtgcacctttgagataattattaaattggaatgccatacctatagattggataaatgctaaagaaattgctaaataacgagtaacattatttaactttcttcttcctacttcaccttgtttcgcccattctgagaatttagggacaatatccatttgtaatagttgcattacgatagatgcagtgatgtagggtacaatacccattgcaaaaatagaaaatcgtttcaaggctccgccaccaaaagtatttaataactcagtggcaccttgagaaccttggggattatcaaaagctgcaggatttactcctggagctggtatataagtccctattttaaaaattactaacattgctagtgtgaagaaaatcttgttacgaacctcttttgttctaaagaagttcacaagggtttgaatcattagatcacctcgtgtgctccacctttagcatcaatagcttctgctgctgaagctgagaatttatgagctttcactgtcaatttcttatcaagtgaaccattacctagtattttgataccagatttttcattcttaacaacaccagattctactaataaagctggagttacttcagtaccatcttcaaatttattaagttggtctaagttaacaatagcatattctttacgatttatgttagtaaaaccacgttttggtaaacgacggaataatggtaattgaccaccttcgaatcctggtcttacaccaccgcctgaacgagctttttgacctttgtgtccgcgaccacttgttttaccgttacctgtcgcaacaccacgtccaacacgattgcgttctttacgtgaaccttctgccggttttaactcatgtaatttcatttcggcacctccttgattatttttcttctactgttactaagtgcttaactttgttgatttgcccacgaatagcagggttatcttcaacaactactgaactgttagtctttttaagacctaaagcttcaacagttttacgttgtgtttcaggacgaccaataacactacgagtgagggtaatttgtaatttagccataactagttttccctccttaattgtataattcttctactgttttgccacgtaatttcgcaacatcttcagcatttttaaggttttgtaaaccatcgattgtagcacgaaccatgttgattggtgtgtttgatcctaatgatttacttaagatatcagtgatacctgctaattcaagcacggcacgaacaggaccaccagcgataactcctgtaccaggtgcagccggtttcataaatacgcttcctgaaccgtaacggccagtaattgtgtgtggagttgtaccttcaacacgtggaacaactactaaatcttttttagctgcttcaacagcttttttgattgcttctggtacctcttgagctttaccagtaccgaaaccaacacgaccatttttgtctccaactacaactaatgcagtgaaacggaaacgacgaccaccttttacaacttttgctacacggttgattgtaacaacgcgttcttcaaattctttcgtctcttcttctctacgagccatgtatttgtccctcctttaaattaaaattctaatccgctttctcttgctgcttcagctaatgctttaacacgtccgtgatataaatatcctccacggtcaaatacgatttctttaatgcctttgtcagcagcttttttagcaattgcttcaccgactttagttgctaattcaactttagttgctgtagtagcaatgtcgctgtcttttgaagaagcttgagctaatgttacgcctttattatcatcaataatttgagcgtagatatgcttgtttgaacgatatacgtttaaacgtggcttttcagctgtacctgataagttagtacgaacacgagcatgtctttttaaacgcactttatttttatcaattttactgatcatttcaatactcctttctttagagtttatctattatttaccagttttaccttctttacggcgaacgtattcaccttggtaacgaatacctttacctttgtaaggctctggaggtcttactgaacggatgttagatgctaatgctccaacttgttcttttgaaataccttcaactttaacgactgtgtttttctcaactgagaaagtaatgttttcttcagctttaatttctactgggtgagaataaccaacgttaaggattaagtctttaccttgcatttgagcacggtaacctacaccaacaagttcaagtacttttacgtatccttgagaaacaccttgtaccatattgtttaataaagcacgagttgtaccatggtttgttctatcttctttagaatcagatggtcttacaacttcaattgtgttttcttcttgtttgaatgtcattctttcatttaaagttcttgataattcacctttaggacctttaacagttacatgatttccatcaaaagttactgttacgtcactagggatgtcaataattttcttaccaacacgactcatgttatggcacctccttattttttattaccaaacgtatgcgataatttctccgccaacattacgttttcttgcttctttgtcagtgattacaccttcagaagttgatactaatgcaatacctaaaccatttaatactttaggcatttcgctagcttttgcataaacacgtaaacctggttttgaaatacgttttaatcctgtgataacacgctcatcgttttgaccatattttaagaataaacgaagtacaccttgtttatcatcttctacgtattcaacatttttaatgaaaccttcactctttaagatttcagcaatttcttttttaatatttgatgcaggtaattctaacttctcgtgacgcaccatgtttgcgtttcttacacgagtaagcatatctgcgattggatctgtcattgtcattgattgttgcctcctttcagactcttttttattaccagctagctttacgaacgccagggatttggcctttgtaagctaattcacggaaacaaatacggcataatttaaatttacgatatacagaatgtggacggccacaacgttcacaacgagtgtattcacgaactgcatatttttgttttttttgttgcttagcaaccattgaagttttagccacttaattagcctcctttaaataattatttacggaatggcataccgaagttagctaacaattcacgagcttcttcatcagtgttagcagtcgttacgataacaatatccattcctctaactttacttactttatcatagtcgatttctgggaaaattaattgttctttaacacctaaagtgtagttaccgcgtccgtcaaatgcttttttagaaacaccttggaagtcacgtacacgtggtaatgatactgaaattaatttgtctaagaattcatacattctttctccgcgaagtgttactttcgcaccaattggcataccttcacgtaaacggaatgtcgcgattgattttttagctttagttactaatggtttttgaccagtgatcaattctaattcttcaacagcattgtctaatactttagaattttgtactgcgtcacctacacccatgttcacaacgattttatctatttttggtacttccattactgaactataattgaattttttcattaagttttcagtaacttcagtgttaaacttttcttttaaacggttcaaagtgggatcctcctttcaacttgttattaattattagatttaatttcttcgccagattttttagcgatacgaacttttttaccatcaacaaatttgtaacctacacgagttggttcgtttgttttagggtccaataattgtacattagaaacatggattgctgcctctgtttctaagattccaccttcaggatttaattgagttggtttttggtgttttttcataatgttaacaccttccacaacgacacggtcttttttaggtagagtagcgattactttaccttctttacctttgtctttacctgcgataactttaacgttgtcaccttttttgatatgcatgtgggcacctccttatttgtattggttgttattaattaaagtacttctggtgctaatgatacgattttcatgaagttaccttcacgtaattcacgagcaacaggtccgaagatacgagtaccacgtgggcctttgtcatcacggatgataacacatgcattttcatcaaatttgatatatgaaccgtcattacgacgaacacctgacttagtacgtacgattacagctttgacaacgtcaccttttttaacaacgccacctggtgttgcatttttaacagtacatacgataacatcgccgatgtttgctgttttacgaccagatccacctaatactttgattgtaagaacttcacgagcaccagagttgtctgctactttcaagcgtgtttcttgttggatcattagttaaacctcccttatctctaaacttgtattaaataattactgactcttcaacaatctctactaaacgaaaacgttttgttgctgataaaggacgagtttcttgaattttaacaatgtctcctaatttagctgaattgttttcatcatgagttttgtattttttagagtattttactcgtttaccgtataatttgtgtgttttgtaagtttcaacaagtactgtaatagtcttgtccattttgtctgaaacaactttacctacataaactttacgatcgtttctttcgctcacttttgtaacctcctcttacttaattattgattagccttactttgttcaatttctctttcacgagcaacagtttttagacgtgcaatcgtttttcttactgtacgaatacgtgcagtttcttctaattgacctgtagctaactgaaagcgtaggttaaaaagctcttcttttgaagatttgatttgttcttcgatttctgaagtggttaagtctctaatttccttagctttcatttgtttcaccacccaattcctcacgttttacaaacttagtttttactggaagtttgtgacttgctaaacgtagtgcttcacgcgcaacttcttcagaaacgccagcaacttcaaataaaattctacctggtttaacgactgcgatccagccttcaaccgcacctttaccagcacccatacgtacttctaaaggttttttagtatatggtgtatgtgggaagattttaatccaaacttttccgccacgtttcatgtaacgtgtcattgctatacgagcagattcgatttgacgagatgtgatccaagacgttgttgtagcttgtaaaccaaactcaccaaatgttacgtagttaccgcctttagaacgaccagttgttttaggacgatgttgacgacgatattttacacgttttggtagtaacattattattttcctcctccactagtgttcttagtaggaagaacttctccacgatagatccatactttaacgcctaatttaccgtaagtagtgtcagcttcagcgtgtgcataatcgatgtcagcacgtaacgtatgaagtggaacagttccttctgaatattgttcagcacgagcgatgtcagctccgcctaaacgaccagatacttgagttttgatacctttagcaccaagtttcatagctctagtaattgcttgtttttgtacacgacggaatgaagcacggttttctaattgacgtgcgatgttttcagctactaaacgagcatcaagatcaacttttttgatttcaattacgttgatgtgtacttttttatcagttaacgcatttaatttgttgcgtaatttttcgatttctgaaccgcctttaccaattaccataccaggtttaccagtatgaattgcaatgttgatacggtttgcagcacgttcaatctctacgtgagaaactgatgcttcttttaattcattatcaataaatttacggatttttaaatcttcgtgtaaaagtgaagcgaagtctttttcagcataccatttagcttcccaatcacggataataccaacacgaagtccgattggattaattttttgacccacagtattccctccttaaaagttaattaagcttctttagcttcttctttaccgtcacttacgacgattgtaatgtggcttgtacgtttgttaatcgcacttgcacgaccttgcgcacgtggacggaaacgttttaatgttggtccttcgttagcatatgcttctttaactactaattcatctgtgttcatgtcatagttatgttcagcattagctaaagcggacattaatactttttcaattactggtgatgaagctttgtttgttaattttaaaattgcaatagcttcagcagcatttttacctctgattaagtcaagaactagtcttgctttacgaggtgcgattcttattgttctagcaaccgcttttgcttccattaggatgtcctcctctacttaatagatattatcttcttgttttcttgtcgtctgcaacgtgtcctttgaatgtacgagtaggagcaaactcacctaatttatgacctaccatatcttcagttacatatacaggtacgtgtttacgtccgtcgtatactgcaaaagtatgtccgatgaaattagggaaaattgtagaacgacgtgaccatgttttgattacttgtttcttttcgcttccttcttgagcttcaacttttttcattaaatgctcatcgacgaaaggtccttttttaatactacgagccatttgggcgcctcccttcttattatgtgcgtgcagctttaagccgcacacccaaataagttgattatattattttttcttacgtccacgaacgataagtttgtctgatgattttttaccacgacgagttttcttaccaagcgtaggtttaccccatggtgacattggagatggtctaccgataggagcacgaccttcaccaccaccgtgtgggtgatcgttagggttcattacagaaccacgaactgttggacggatacctttccatcttgaacgtcccgctttaccaacgttaactaattcgtgttgtaggttaccaacttgaccgattgtagcacggcaagtagataagatcatacgaacttcaccagatcttaatctgattaatacgtatttaccttctttaccaagtacttgtgcacttgcaccagctgaacgagcgatttgtccacctttaccaggtttaagctcgatgttgtgtactactgtaccaactggaatgttttgtaatggtaatgcattaccaactttgatgtcagcttcagcaccactttcaacgatttgacctacttctaatcctttaggagcaatgatatatcgtttttcaccgtctgcatatacaactaaagcgatgtttgctgagcggtttggatcatattgaatagaatcaacttttgcattgataccatctttgttacgtttgaaatcgataacacggtattgacgtttgtgtccaccaccatggtgtcttacagtcaatttaccttggttgttacgtcccgcttttttcggtagcggttttaataatgacttttcaggtgtagttttcgtgatttctgcgaaatctaacgaagtcatattacgacgaccatttgttattggcttatactttttaatagccattgtcgcttacctccttaatggtaattggtttattagttaaataagtcgattgatccttctttaagagttacaatcgcttttcttcttttgtttgtatagccttggtaacggcccatacgttttttcttaggtttgtaattcatgatattaacacttgcaacttttacgttgaagatttcttcaactgccatttttacttgtgttttgttaacacgagtatcaacgtcgaaagtgtatttgtcttcagccattgcttcagaagatttctcagtgattacggggcgcttaagaatatctcttgcttccattatccgagcacctcctcaacttttttagcagcagcttcagtaattactaagctgtcagcattagtgatatctaaaacatttaaaccttgagcagttgttacttgaacgccagggatgttacgtgctgataattcaacatttacatcttcgttttcagtaactactaaaacttttttaggttgttctaatgtagataatacatttttgaattctttagtttttggagcttcgaagttgaatgcgtcaactactgttaagccattctcttgagctttgaaagataatgctgagcgtaaagctaaacgacgcattttcttaggcattttgtatgcataacttcttggagttggtccgaatacgataccaccgccacgccattgtggagcacggattgtaccttgacgagcacgacctgttcctttttgcttccatggtttacgtccgccaccgcttactgctgaacgatttttaacagcatgtgtaccttgacgtaatgaagcacgttgtaaattaatagcttcgaaaagaacgctattatttggttcaataccgaatactgcatcgcttaattcgattgaacctgatttagttccgtctaattttaaaacatcataattagccattatgcatttcctcctttcacttcttattatttattaccttttttaattgaagttctgatttctactaaaccttttttaggtccaggtacgttaccttttactaagataactttgttttctgtgtcaacttgaactacttctaagttttgtacagttactgtatttccacccatgcgtcctggcattttttggcctttgaatactcttgaagcatctgaagccatacctacagaacctggtgctctgtggaaatgagaaccgtgtgacataggtccacgagattgtccgtggcgtttaattgcaccttggaaacctttaccttttgatacgcctgttacgtcaataacgtcgccagctacaaaagtatctactgagacttcttgacctacttcgtaagcatccacgtctacattgcggaattcacgaatgaagcgcttaggtgctgcgtcagcttttttagcgtgaccttcagctggtttattagcatatttattagattttgcatcttttttgtatgcttttttgtcttcaaatccaacttggattgcgttgtatccatcaacttctacagttttcttttgtaatacaacattttctttagcttctactactgttacagggattaattcaccgttttctccgaatacttgtgtcatcccaatttttcttcctaagattcctttggtcatcgaaagtccacctcctaaaattgtctattataatttgatttcgatgtctacaccagatggtaagtttaagcccattaaagcgtcaactgtttttggtgttgggtttacaatatcgattaaacgtttgtgtgtacgttgttcgaattgttcacgtgaatctttatacttatgcacggcacggatgattgtgtaaactgatttctcagttggtaacggaattggtccagaaacatctgcaccagaacgtttcgctgtttctacaatcttctctgctgattgatcaatcacgcggtgatcataagcttttaatctgattctgattttttgttttgccataattttccctccttattcgtctacatttagtgatagacttctccacgaaaactatcttacacagcgccatggcaaagcggccgggtgtgtcagtaacctttcgcttcatcgcttttcttaaagtccaacgttagttatattacacgaaaaacatcgataaatcaaggcttttcacataatttttctatctgtctaacacatacttttatattttactttatatacttagtcagttcaactattttcgagatattttttatttcctcctttattgtaaattcgtaccttgaatcattttattattatcattgaaaattattctttataattagtcataagaatggtggtgaatgaatatgaaaaatggaccaaaattatctttagcacttataggtatctttttaatactttgtgagtttttctatggcattccttttttaggtgcaacttttattttaagctttggatggcagcctttactctttaatgcattactttatctaattcttactattatattactagtgaatagacaaaatgcgattagacctatagcgattattccaatatttggtatagtaggtagttttttagctattatccccttcttaggaattttgattcattggattttatttttcctaatgattctatttgtcttagttgtattatcggcaccaacctatatacctaataaaaatgctcgtgtcatttatacacaatacaaagatggacatagagaataattcttaaaacctttttaatcaggtatatataatatagaagaaacacgttcaacaattttaaaagaagtatatttgtattggatatttaaagacattcataatattactttatgctatttcgcttcttattttatccttacttcaaagaaaaaaacgactaccaatcattggcagtcgtttttttgtgtctggatttaaccatgaacaaatatgaagtacaaaatgaatagtaccattaatacatacattatcggatgtacttctttatgttttttagagataagcattgtaattggatagaaaataaatccacacgcaataccagttgcaattgaatatgataaaggcatcataatgattgtaatgaatgctggcacagcaacttcaaaacttttccagtttatctcagcaaagtttgcagccattaatacacctaccaccactaaagctggtgtcgtaactgcacttgttacaacagcgattaacggactaaagaataacgctaataggaaacaacaacctgttacgatactagcaaatcctgttctagcacctacagcaacacctgaagttgattcgatataagaagttgttgtagttgttccaaaaattgaccctacaatcgtagctaaagaatctgagaataatgctctaccagctcttggtaatttattatctttcataataccagcttgagtagcaacggctactaatgtaccagctgtatcaaagaaatcaataaataagaacgttaaaataacaatcaagaactgtatcgttaataattgacttgggtctttaaacgcttcaaatgcagcaccgaacgttggttcaatacttggaattttacctacaataccagatggcatttgaatcaatccagtgaacataccaacgattgctgtgatgatcataccgataaagatagaacccggcaatttaattgcatataaaataactgtaataacgataccgaatatcgctaaaagtactggtggatcagttaaatgtcccaatgttactaatgtagattcatttttaactataatacccgaactttgtaaacctacaaatgtaatgaataaccctatacctgctgaaacagccatcttcatttgataaggaattgcattaataataacttccctaaaccctgtgacggttaatatcgcaaagaatatacctgagaataaaacacctgttaaaccaacttgccaaggaatacccatggttaatacaacagtaaatgcaaagaatgcatttaatcccatacctggtgctaacgcaattggatatttagctattagtcccatgaatagcgagcctacaaatgctgctaatgcagtcgctacaaaaatggcaccttggtccattttcatatcttctgatacgcctttaacaccggctaaacttaaaacttgcgggttaactgctaaaatataggccatagataagaaagttgtgataccgcctaagatttctcttttaaagtttgttccatatttatcgaactggaaatagtttttcacgaatggatgctcctttttttaaaataccttaatagtttaatatcattcttaataaaaaacaataccaaaagcgaacttttcgattttctgattcaactttgttcgattttatctataaattcaagttctttaatgcatctttaaacggattattgtctaaaccttcatttttattcatatactttttcatttctttacgagatactttaccagaggatttagacttcatacgctgatccatatgtgcttgcgtttcagaatgtccacaaacacaacgatataccgcttctttccctttaccaaacaacgttaatttctttttacagtttggacatcttgcatttgttttgcgctgtacattctttttcgtcttacaagatggatcttggcacacaagcatctgaccatttttagttttaactttaatcatgaatttaccacatgttgggcattcagtggttgttaaattatcgtgtttatatttacgatcactatttttaatcccatttacaacatctttcgtaaaatctttcatttcattaatgaatgttttcgcctgatatttaccacgttcaattaaaagtaatttttcttcccattgtgcagttaaaagtggcgacgttaattcttctggtgctaattctaatatttgtttaccttttgacgttactttaattttaccgtctcttgattcaatggcattcatattaaataatttatcgataatgtcggcccttgttgcaactgtgccgataccacccgtttgttttaaagtttgcgcatattttttatccttcaattgaataaagttctgagggttctccatcgcttttaataacgaaccttcattaaaatattctggaggtgttgtttcatgttctctaatgtttgtttttgaaattttcacttcatcgccttctgaaaaaggctgttgcatctctgtaatagattcaccttgtctaatagatttaaagcctaatacagttgttacattctctttcaaaacaaatgtgtgccctgcaacctctaaagttacagttatcgcgtcatactcgtgcggaggcattaaagcttctaaaaaacgctcgacaatcatatcgtataactttaattctctattacttaagtctgacatgacaggtctcacttctgtaggaataattgcatggtgatcagatactttttgattattaaatatcgacatttttgatgaaaatgttttagacattaatgggcgtgcttggtctttatatgttgttgccattgtcgcctgaatacgttctttcatagtatctaccatatcagttgttaaatagtttgaatctgttcttggataggttacgactttatgtctctcatataaactttgaagtgtattcaatgtttctttaggtccaattttataacgtctatacatatcttgttgtaaatctgttaaattgtacagtgattgcggatacgacttcttatgtttagtagcaacagatttaaccttaccatcgacattttttaaattattaactatctgttctaaagtttctttattggtatatcgctgatttgattctagctgaaaatcaaacccttttaccgttaatgataatgtatagtattgttgtggtttgaactgattaatctcttgttgtcgtgtatttactaactgaatcgttggtgtctgaacacgtcccagggatagctgtgcatcatactttgttgttagtgcacgcgttgcattaatcccaacaatccaatccgcctcacttctcgctaacgctgcataatacaaatcgttatattggcgaccgtcttttaaatttttaaaaccttgttgaatagcttttttagtaactgagctaatccataatcgacggagtggctttttgttaccaactttatccaaaatcaatcttgcaactagttcaccttctcgtccagcatctgttgcaataataatatctttcactttattatctaaaattaacgcttttactgttttaaattgtttgcttgttttaccaataacaacagttttcatatatttaggtataattggaaggtcttctaatcgccattcctttaaatttttatcgtattgttcaggtgtcgcatttgttactagatgccctaacgcccacgtgacaatatattggttattttcaaagtaaccattacgcttttgatttatttgtaaagcatcagcaatatctcttgcgactgatggtttttcagctaatattaaagatttcataaattatcctttctcatacgttcttttatttcgaacgtgcttcatctattccactaatctttgatttaaattcaatgattgcaaatgatgtgttaaatgtattgtaacatgttaatatcactattaactttcatttcagttgaaatattatataataaaagtaacaaaaagtacggaggtaatgacatgagcatagttcagttatatgatattacacaaataaaatcgttcattgaacattcgaattatgaatcagcatcatacttatataaacttcctcaacagtacaatgaaatagatgtattaataaccgatgcgattgaatcacctggtgtattttcgattaaagaaaacgattcaatcaaagcaatcatattgtcttttgcatacgataaaaataaattcaaggtcataggccctttcgtggctgacaaatacgtattatctgtcgatacttttgaaacgctgtttaaagcaatgacttcgaaccaacctgacgatgccgtctttaacttttcttttgaagaaggcattcaacaatacaaaccattaatgaaagttatacaagcaagttataacttcactgactattacatagaagcccgtacaagattagaagaagatatgcaccaaccaaatatcattccttatcacaaagggttttatcgtgctttcagcaaattacacacgactacatttaaatatcaggcacagtcaccgcaagatatcattgatagtttagacgaccatcatcatttgtttttatttgttagcgaaggtttacttaaaggttatttataccttgaaattgattcacaacagtcaatcgccgagattaaatacttcagttctcatgtagattaccgtttgaaaggtatcgctttcgagttgcttgcgtatgcattgcaatatgcttttgataactttgatattagaaaagtttattttaaaattcgtaacaaaaataataaactcatcgaacgatttaatggtctaggtttccatatcaactatgagtacattaaattcaaattcgaatcacgtaacgtaaaagatcaaacaatccctgaataaaataccaaacaaataccccacagtacatcattagcatgtattgtgggtttttctactttttgtaaatattgaaaattataagtagttgttttttactattagggcagaatgctttacaataacatgcaagtgtcaattaaggggagcacttgcataaatagtataggagagtgagtagtcttgcaatttcttgatttcttaatcgcacttttacctgctttattctggggaagtgtcgttcttattaatgtgttcgtcggcggtggaccttacaaccaaattcgtggtacgacgctaggcgcactcattgttggattaggtttacttattactggtttcgcaaaattcaataatcctactgtaattattgtcggtcttatttctggtgcattatgggcgtttggacaagcgaatcagcttaaatctattagtttaatcggtgtatcaaatactatgccagtttctacaggtatgcaattagttggtacaacattattcagcgttatctttttaggtgaatggtcttcaatgactcaaattatctttggtttaatcgctatgatattattagttactggtgtagcacttacttcacttaaagctaaaaatgaacgtcaatcagataatcctgaatttaaaaaagcaatgggtattttaattgtatctacagttggatatgtaggtttcgttgtacttggtgatatctttggtgttggtggaactgatgcattgttcttccaatctgtcggtatggcaattggtggcttcatcctatccatgaatcataaaacatcacttaaatcaacagcacttaatctattgccaggtgtgatttggggaattggtaacttgttcatgttctattctcaaccaaaagttggtgtagctacaagtttctcattatcacagttacttgttatcgtttcaaccttaggcggtattttcattttaggagaaagaaaagatcgtcgtcagatgactggtatttgggcaggtattattattatcgtgatagctgctataattctaggtaatttgaaatagaaagttaaatactcatgtaacgtaaaaatgttattacttctgaaaataaacattcacttttagaatgattaaaattaattttcgagaattttacgttgaatgttcttctatatgtcccaggaaatacatggctctaaaaacaaaacgcaataacacatcatgacattaatcatgcggtttaagactttaaaattagcgatacttttaaagtcttgatgatattcgtttatcaagtatgcgccatacatatgaagtggatagctgcatagggagtgggacagaaatgatattttcgcaaaatatatttcgtcgtcccaccccaacttgcattgcctgtagaatttcttttcgaaattctctttgttggggcccatccccaacttgcacattattgtaagctgacttttcgtcagcttctgtgttggggcccctgactagaattgaaaaaagcttgttacaagcgcattttcgttcagtcaactactgccaatataacttcgtagagcatagaatattgatttatgtaccggcctgttgaacaactatgtcataaataaaagcccccttttaacaatatgcacttacatgttgtggtaaagggggctctcattttcttcgactattaaaatggattttattttcaaatgtgtaaactagacaaacactgcctgatacacgtacaaaataatgatactaatgattattgtcaaattggtcgtcatacctataaatggcagtgttcgatatttaaactgaataccataagaaataattgcgacaccaaccgggaacatccaagtgaccaacaatgtcgtcttaatcatatcatctgataccggtaacaacacatgtactaacaatcccgcaactaatgctaatccataatgcaaacataaatatttaatagtagcaggtatatactttctttccagagtaaaattcaacatgacacctagcaaaatcattgataacggcatatttgcatgggaaagtatgctaaagaaatcgattgccacatgtggtaaatggatgtgactaatattcaatataaacattacaatgtatgtaacgagtggcactgattgtaataatttcttacctaaatatttaaaatcgaattgatcactaccttcactaaagtagctacctacaaagtaagtaattccaaacatcacaaaggcaccacctatatcagccataccaaaataaataagccccgttttaggccatatcacttcaattagtggatatgcaaacaatccaatattcatagcaccagtcatcatacctactgatccacgcatgtgattatcatattttctaaaaaaccagacagcaatcattttcgccacaataccatatataatcattaaaattggtaaaatggagaatgacaattttaattctgcactgtttaaattcacaataactaaagatgggagtgtgacattaagaactaatgtagcaatgacttgactatctgttgcctttatataattaatgcgcttcaaaaagtaaccaagcgcaattaataaaataatcatagtaaattgttctgtcactgttatcccttctttcaataatcttcataatttataactttaacatactccacagatattttagaagtctactgtttcatgctataatctacattaaatgcacttaattatatttcaaaggagtgttatagtatgtctttagaaaaccaactagccgaacttaaatatgattatgttcgtcttcaaggtgacttagaaaaacgggaatctttgaatttagatacttccgcacttgttcgtcaacttaaagatattgaaaatgaaattagaaacgttcgtgctcaaatgcaagattaataatctatcattcagacaataaatgcttttcgttacataaatttgactagcattgctctgaatacgttatattgatgaattgcttcatttttcgctcaatcacatctagaatcacaagatgttgtcgtgttatgatttagtgtctcattaacaacatacgcgcatatctatcccaacactgctatttatgttttctacgctgctgtactacacgaaccctttgaaacggagaggaagttatcatatgcaattttatctgattttactagcactactttatttagttgttagttttattagtatttttaaaatggaagtgatattcactcgtattttgagaattattatgggtgtgttgttattattcgtcgtagcattaacgacgatgagcttcccgaaagaaaactggtgggtctttatcgtcttattactcttagttggtaatgtcgaagtgacaggattcaaaatgcttaaaaaagatctaaaaggtgtaaacatcctaaatttaatgtcattatttatctttgtcatatacttcatcttgaccatcgcattattctaagtaataaacaaaacatgcaataacataattgcaaccttatattatcggattacatgttgaataccagtattgttttattaacacatcgattaaatcgcacgtgaaataaggtctaaaatttcaaattttaaaaagccataaaagtagtcaatatcatgaccgcttttatggcttttatattatctatcgtttagtgaatcgtttttttaaagtaaagagaatttcatatattactggtacaactacaagtgttaataaagttgatgaaattaaaccaccaataactgtagcggctaatcctttcgaaataagaatcgagctatcttgaccaaataacaaaggaactaatgcaccgattgttgcaatcgccgtcattaatatcggtctaattctagtaccgcctgcttcgattaatgcttctttcatttccatgccctgctgctcattattaatgacacggtctattaacacaatggcatttgttactacgattccaattaacattagcataccaattaaacttggtactgatattgtttctcctgtgattaatagtgcaataattacaccgataactgtaaatggtaaagagaataaaattgtaaatggcgctaagccacctttaaatgtaataactaggattaaatatacgataatgattgcagctaacattgcaaaggctaattgtgtcattgcattgttaatatcatctgatgcaccaccgatattaacctttacattattcggtttgtccaaattatttattttagacatcacttgtcgtgttgtgccacccacatctttatttgttactttagcagataccgtcgttgcataatcaccttgttcttgcgtcaatttacttggtgtcgttgttttaactaatgtagcgatatctcccaatttaatcgtaccaccagtcggctttttcaaagttatattattcaacttatcttctgaccagtctgtttgcttattttgtttgactttaacatcaacagttttaccattttctttaacagtcgtaactgttttttctggtaaattttcattcaagtgcattgcaagttgacttgcagaaataccattttctgccgctttattttgatcaactttaatttcatactgatcatatgtttgcgataaatcagatttgacattggctagtcctttaacctgtttcattttctgttcaatatcttttacagttgattttatggcatccattgatggacctttcacagtaacctctacagatttattacctgcacctgttcctaaatcttgatttttccactctccaggatgtttaaagccatctgcatgtttaataaccttatccgcttctacatcaaaattaggcgtgtcattatcatattcaaccatgattgccatactatttgtactacccgttggatctactggactactaccgccaactgagtattgaattgtttttacatgctttttctgttttaaatatttttcaacatctttcgcatgattcaacactgcttgctccgtttcaccaggcttcggtgtataagtaatagctaaaaatttatcgtcacctgctgaaataaagctagtgcctagtctcggtcctccaaatacaatagttgcaaccaaaattaatgtacttaatataattacaatccacttatgatttagtgaccaatgcaatacttttttataagttgtactaacaacacctaatccttcttgatgttgtttattacgacgtttaacgccttttttaaatagtgttgctgccaacgcaggaacgagtgtaattgacactaataacgatgctaataaactaaatgcaatagccaatgcaaaaggtctaaacatttcgcctactgaacctgatacaaacacaagtggtaagaagacgataatagtaactagtgtcgatgacattattggtttaaatacttcagttgtcgcactgataattaaattttcaccttttagttgttcttctgaatctgttaagcgtcgataaatattttcaacaactacaatcgaatcgtctatcacacgtccaatcgctactgttaatgcacctaacgttagtatattcaatgaaacatcactcaatttcagagcaataagcgccataagaagtgataacggaatggatataatagaaattgccgtcgtacgaatgtttcttaaaaacagtaaaataactataattgccacgattgtacctaatgatgctttttcaaccatcgtataaagtgatttctcaacaggctttgcagtatccattgtttttgtgacattaaaatctttattttcatcaacgaatgtatcaattttacgttgtacatctttggctacttgaactgtattggcatcttgagctttagttatttgtaaattaaccgcatccttgccattcgttttagaaatagaagtacgcacatcaccaactgtaatatcagctaaatctcctagtttcgctgtcggcataccacttatattatttgatgctgacgcttttgaattttgttgcggtgatgcctggttaacatctgacatggctgaattttgtttattgtcactttgggattgagattgcccttgtcctcctgccaacgttaatggaatatttatgtttttaaaagcatcaacagattgatattgaccatcaacaacaattgatttatctttatcaccaaattggaacaatccaagtggcgttgttcttgttgccgtttttagatagttttctacatcatcagcagtcaatccatatttttcaagttcattttgcttaaatttaagggtgatttcacggttcgtctgcccatttaattgcgcattttgcacaccatctaccgtttgtaattttggtattaattgttcattcagtactttcgttacttttttcaagtcattctctttatttgaaaatgaatatgctaaaatcggaaaagcgtccatcgaattacgtcttaattctggctgaccaacttcatctttaaatttaattttatcgatttcttttttaagctgttcttctgctttatccatatctgtattattttcatattcaactgttacaattgaagcattttgtatggattgcgttttaacatttttcacatatgccaacgatcttacttgattgtcaattttactacttatttcatcttgggtactttgtggcgttgcacccggcattgttgttgtaactgaaataactggattttgtacatttggtagtaattctaatttcaatttagcactcgcatatacaccgcccaagacaactaaaacaaccattaaaaagatagcaaacttattccctaaagaaaattgtaatagcttttttatcacagtacttccccctctttcactatattcaaaaatattttactcaaccattctatattgtgtaaaaaaatctgaacgcaaatgacagtcttatgagcgttcagatttcagtcgttaatctattttcgttttaatttacgagatattttaattttagcttttgttaaacgcggtttaacttgctcaattaattggtacaatggctgattcaatacataatcaaattcaccaatcttttcacttaagtatgttccccacacttttttaaatgcccataagccataatgttctgagtctttatctggatcattatctgtaccaccgaaatcgtaagttgttgcaccatgttcacgtgcatacttcatcatcgtatactgcatatggtgatttggtaaaaaatctctaaattcattagaagatgcaccatataagtaatatgattttgagccagcaaacattaatagtgcaccagaaagataaataccttcaggatgttccttttctaaagcttctaggtctcgttttaaatcttcatttttagcaattttattttgcgcatcattaatcatattttgcgcttttttagcttgcttttcagatgtttccatcttctgctgccatttagcaatttcggcatgaagttcattcaattcttgatttactttagcaatattttcttttggatccaacttcactaaaaataattcagcatcgccatcttcatgcaacgcatcataaatattttcaaagtaactaatatcacgcgttaagaagccatcgcgttccccagtgattttcattaactcagcaaacgtttttaaaccttctctatcagaacgttccacagtcgtacctcgttttaatgccaagcgcacttttgagcgatttcggcgttcaaaactatttaataattcatcatccgttttatcaattggtgtaatcatagtcatacgtggttggatgtagtcttttgataaaccttctttaaatcctttatgtttaaaaccaagcgctttcaaattttgcaaagcatctgtacctttatcaacttcaacatcaggatcgattttaattgcatacgctttctcagctttagcaatttcttttgtactgtctaacaatgcatttaacgcttctttattactataatcaacaacaaaaccacgcgaaatataacatagcgtataaggtaatttaggtacttttttaaaaagtaactgcgcaacaccctgaacttcaccgtcacgacctacagcgattcttcgcgcgtaccatcctgttaatttctttgtttctgcccatttcgttaattgtaataaatctccatttgggtgagatttaacaaatgcgtcatgttcctgattagtgatatgcatcttttccatgatttatgatatctccttctatttaacaatacctttaattatacagtttgtatcttatagtgtcgattcagagcttgtgtaagatttgaactcttatttttgaaatgtccatgctccaatcaatagtttggcaagttcaaatttactcattttaattgtgaatcattttatatctatgcttcctgttaaatttaatgttatcgtacaattaatacttttcaactagttacctatacttcaatatactttcatcatctaacacgatattcatttctaacatgaaccaatttgacttcaatgaataaatttctcctcaagcaaccacattaatgttcatatacaattacccctgttataatgtcaataatctaacaatgaggtgtttgatatgagaacaattattttaagtctatttataattatgaacatcgttgcaatcgttatgacattgagtcaacctctcaccgtgaattactttagtttacgggttatacttatctttttcacatttatattatcaatctttttcattttaattaagtcatcacgattaaataatatattaacgattctttccattgcgcttgccgttattcatatgggcattctcgctcatagcacttacgtatatttatactaatggttcaaagcgataaatagcacctctgataaaaattgaatatggtgaagttgcttgtgcgtcttttattataaccgaatgatattttgaaactttaccatcttcaattctaaaataaatatcatcattttttaaaatcaaatctgtgtaatggtcgttctcttctacaatgtccatatcaaaccatttcaaccaattcgatactgtttgtgatcggtttttacttttcacaataacagtttcaattgaaaattgtttttgaaaatatttttgcaattttttagtacgcatggaatcactttcttcccattgaataaaaaatggtggcttaatttcatcatcatcctgattcattatataaagcaattgccactttaccttaccatctttatgtgtatctctttccatttgaatcggccctactacttcaacctgctcactttgtagtttatttttaacagcctctatatcatttgtacgcaaacaaatatttttaaagccttgctcatacttctcttgaacaatttgagtagcaaaagcgactccaccttctatcgtttttgccatctttttcaacttttcattattttctacatctagtagctcaatataattttcattgatataacctaatttattgaatgttccatatttatgatgatacccacctgaatgtaattttataacatctcctggaaaactaaaccgatctaaccgatctatataatgaatgatgtgatcaaatttcaatatcattagtatccccctatttacatgtaattacgcttattttaacaaagtataaatatttttgctcttaataattatatattgatttctaattgcccccgttttataattactattgttgcaaaaaaggttagctaagctaactattttatcttaggagatgtcactatgctatcacaagaatttttcaatagttttataacaatatatcgcccctatttaaaattagcagagccgattttggaaaaacacaatatatattatggtcaatggttaatcttacgcgatatcgctaaacatcaacccactactctcattgaaatttcacatagacgtgcaattgaaaagcctactgcaagaaaaactttaaaagctctaatagaaaatgaccttataacagcagaaaacagtttagaggataaacgacaaaagtttttaactttaacacctaaagggcatgcattatatgagattgtttgtcttgatgtccaaaagctccaacaagcagtagttgccaaaacaaacatttcacaagatcaaatgcaagaaaccataaatgtgatgaatcaaattcatgagatattattaaaggaggcacacaatgactaatcaaggctcattaaataaatcacctattttcaccaaaagttttacaattaacttttttgtcaattttatcgtatacctatgcatgtatttgttacttgtagttattgctggctatagtaagcaagctttcgacgcttccgattcattagccggattagttgtaggactatttattgtcggttctttaattggtcgatttgctacaggtaaatttgtaaatcaaatcggacctaaacgattattatttattggtttaattgctttaattatcacgcaattactttattttattgatggatctttagcttttttaatctttgtacgtctcataaacggtatcgcaactgcagttgtgacaactgcaacaggtactattgcggcatacgttacccctgttaatagaaaaagtgaaggcatcagtttattttctttaagtttagtattaggtacagcgattggcccatttctaggcatgttacttattacaaaatacgcaattgatttactgtttattatttgtgttatattaggcatactcggactcattatctcattatttataaaagttgatttcgaagtaacaaatagcaaaactgaaactaatgtcattgataaaccaagatttagtattcatcaatttattgcaaaagaggccattcctgttgctgttattatgcttttaattggcgttacctatgcgtccatccttacttatttacaagcatttgctttagagcgacacctagtaactgcagcaagctatttctttatttgctatgctatagcatcgttaattactagacctattgctggtagattgatggatgataaaaatgaaaatattattgtctacccagcatttatcatgcttttactttcatttgtgtgcttaatttcaagctatcaaagctggttaatattacttgctggtgcttgcctaggtttagggtatggaaatttatcatctgcaatgcaatctattgcgataaaagtctcacctccgattaaatatggtatcgcgacatctactttttacgttggtctagatgcaggtatcggcttcggtccatcattccttgggttatttactcatatgttttcatatagtgaaatcttcggctttatggccgctttagcaatcattactatgcttgtttacttcttaattcatggacgtcatgtaactagaaatgccatgaactaaatatttatattcaaaaataaaaagcatgccaatctctattcatcatttgtctgtccccaagacgcaattataatgtactgattggcatgctttttaagtttttagtttgtaacgcttaacacttctatttctttagtaattttatctaacaatttcttttgagaagtactatagaaatagaatacttgtctttcatccgtttcagaacgcaatttagaaataagctcttttttatagattttacggataatcacatcgattttacttgtatcccatagcatttcaaaatgtaatgtatctctcaattctttaccgctaatcttttcagcttcatacactttaaaaagtactacaaattcttcaattgaaatcttatgtgttgtttttagccagtgctttaactgacttaactccctttctgcttctataaaacgttgaactttattactcataatatgatgcctcctatgtttcttcttagatgtttgtaattcatattattatacaattacttaaatttattatatatcaaacttagcattttatctattacaaatattaaattgctggctatatcttgtttagatttatatcttttggacaacttgttgtttattcgacaacatttatacctaaaaaagatatattacaactcaatgacatggagtgtgacactaatgttaaaaaaccactaaagatttattatgtagttattcttaagagtgggatagaaatgatattttcataaaatttatttcgttgttccccaacttgcattgtctgtagaatttctttttgaaattctctatgttggggccccgttccccaacttgcacattattgtaagctgacttttcgtcaccttctgtgttggggccccgccaacttgcattgtctgtagaatttctttttgaaattctctatgttgggccccgttccccaacttgcacattattgtaagctgacttttcgtcaccttctgtgttggggccccgttccccaacttgcacattattgtaagctgacttttcgtcaccttctgtgttggggccccgttccccaacttgtacattattgtatgctgacttttcgtcaccttctatgttgggaccccgccgatttgtaaaaacattaaaaacgatcatttctattaaatctggcatagatatgaccgtttatactttaataaataatattgtattttagggagtaagacagaaatattaaagaatctctaatgatttattatgtagtggttcctacacattaaccaccaatataattcatgtttatctttttacgttgacgattggcaactgtttgagcagttctctcatctgaatatcgatcatctcttatttgccataaagctttaaattgttcttttaattcttcgtcggtcaccccagaacgaataaacgttttaacgttaaatccatcgacagttgcaaataaacatccgtaaaacttcccatctgatgacagccttgcgcgtgtacatgtagaacaaaatgattgtgaaacacttgtaatcaaaccaaattgaacaccattatccttatggcgataatattttgctacttccccaaaatattttggttctacaggattgatttcaaagtgctgctctatcatagtaagcatttcatctttagttacaactttgctgaaatcccatccattatcattaccaacatccataaattctataaatcgaatctctatatgtttatctttaaaatattcaagcattggtataatttgatcatcgttaatacctttttgtataacaacatttacttttacattcaaaccaatagaagtcgcgtaatcaatttgttctaaaatcgtagtcgctttaatattacgattattgattgattgaaataacgtatcatcaatagcatccaaactgacattaattctgcgtaacccagcatcatataacttttgtccatgcttttttaataacaaaccatttgttgtcaaaccaatatcttcaataccatcgatttgatttaatttagctataagtacatctaaatcccgtcgcatcaatggttctccacctgtaatacgtattttttttacacctaattctgcatatacctttgcgattctagccatttcatcaaacgttaacagttcatttttaggtaaaaatacgaaatcatctccaaatacctctttaggcatgcaataatcacacctaaagttacaccgatctgtcacagataaccgtaagtcacggatgggacgtcctagtttatcttttatttgttctaccatttgtggacctcctaacggcttacaaattttgaattaaagtgtccaaatcatgctgataatttatatttttgtaccaatatgggggcgcatctacatccctgacatccaaataatccgttgataattcatgatatacatttttaaaactgtaattatcagaatgtagtgctttagttatagcgcctaatgcattcggactataaaatgcaattgttggaataaaacgtccatcttctttaaaagctgcgacatctaaatgattttcaataagatgagaaactaaaaactgatacaacgtgcttacagctttaccagtaatcattggtgtatcaacagaaactacaaaaaacaattcttcttcaggatgttgcttcatgattgtataaattcctgctaatggacctttatcattatgattctcatcatctataacaacatttggatatttaaattgcgttgccaattgcgcatttgtactaataataatttcattgaacatatttgttgattctaatgtcttaattactctactataaaaggtctcaccgttcacttccgcaaaagctttgggcttaccaaatcgtactgaatgaccacctgcaagaattattgctttcatgctcgcttaacctccactaaccggtggaattaatgcaacagtatcattaggttgaatgaaatcggatttttgtacaaattcctcatttacagcaacttgaaactttttattattgatttgcggataacgttcaaacaataaatcttcaaattgttgtacactcaatgcttgttcaagcacaatatcttcctgtgctttttgtaatatatctttaatttctgcgaagtaaagtaccttcatctctcttattcctccctcttcgcttcttcataattccctttttgatgcccttgccattttgaaccatcttcccaaatttcttttttccaaatcggaacaatttcttttatacgctcaattgcatattcatttgctcgataggcatctttacgatgcggtgaagaaactgcaattaatacagcgatatctgaaatttgtaatggccctattctatgaacaatactcgttatcgttccaggccatttttcatttatttcatctccaatttgtgccaatttcttttcagccattggaatatacgcttcatattctaaatattccgttttgacgcctttagtccattcgcgaacatgaccggtaaaaacaactactgcaccttgatattcatttatagtgaattcacgatattgttctgtttgtatcggttctgtcacgatttcaaattgtttcattcatttcaatcctctatattaattgtgtatcacaatcatttttaattttatttaataaccattgctcaaatgctgtaaaatcttcatgctccctaacattaatgctataacaaacattcaacaactgttgtaatacttgtaactcttcttcatctcgatagactacgactttttcaaaatcagcatttttaaaaccttcaactaatacgatattggtgtcaattgtaacagatttttcaataatttgagtaagattttgattttctacacgtgttacagtttgctgatattgaaaaccttgtacaatactttgatctgcccccgcttcaaaatgcttcatgtgatcgacgtctgaatcctgtaattgaagatcttccttaccatgcccatgatgtttaatagtagcaactgtataaccatgtgactttaagaaagagacaatatgcctcatcaatgttgtcttaccagactttttgtaacctacaatttgtaaaatcataaaagaagttcctcttcagcagcgtcagattcagtcaatataatatctactgtatgacccgctttaaaaccacgtgaccctcctggtaacatgaccatacagttagcatgtgcaatcgctacaaccgcacctgatttattgaatcctgaaggtactacagtagctccagcacttgttaacgttgctttagcacgtataaatcgtgtgaatgggtttgccttggtaaaatcttccattaatgttgctttaattatttgcgggaagacttctagtgcgccacacatatgtttaacagctggtttcacaaatagttcaaatcctgtaaaacaagctgatggatttccagataatccaaacaaatactttccatctgcaaatgcaaccgttgttacgctaccaggacgcattgctactttattaaataacacttccgcctttacggacttataaatctcaggtaaataatcaaagtctcctacagaaactccacccgttgtaataacgatatcgtgtttttccatagcttctttaacgacttgtataccactatctaaatcatcttgttgtgttttgtaaataccaacttcaagacctaatttttctgctaaggcacgaatcattggaccattagagttacgaatttttccatcttctaatacatcattaacatctaataattcgcttcctgttgcaataacagcgacgctcggttgcttaataactttaacctctgcatagccatatgttgcaaggaccgcaatagcccctggattaattacttgtcctttttttagaacaacatctcctgtcgttgtttcttcaccttttaaagatatattttcattttttgaaaatggcttacgaattgtaaatgtatcttctagttcaatcgtttgttcaaacataacaacagcatctgcgccattaggtatttgtgctccagtcataatacgcaccgcttcgtgatccccaactaatttatcagaaactgaacctgcaccaatatgatcaatcactttaaactcaatgcgattctgaccacttgccccttgtgaatcaacactgcgaattgcaaaaccatcataaggtgatttatcaaaccttggtatatcataagtagctacaatatcttctgctaagatatgatttagacttttttcaagtgctaccgtaattgccggcattgaactctgctgattaacgatacgttgaattgcttctttaactgggattgggtttcttttttctactaccattaaaaatcatctccaaaacttttattttttcatgatatactagatgcactaggaggggtaaaatgactgagtttactcatattaatcaacaaggccacgccaaaatggtcgatgtatcagacaaacaaattacaaaaagaactgctgtcgctcattcaagcattactgtgaatgaaactatttataagcagatttctaataacaccaataccaaaggcaatgtattgaacactgctcaaatcgctggtattatggctgccaaaaatacatcaacaattattccgatgtgccatccattaccattgactggcatagatgttcacttcagctgggatgaaacaaatgcacccctttatactttaaacattcaaacaactgtctctacaactggcaaaaccggtgttgaaatggaagctttaaccgctgcatcagcaacggctttaaccatttacgacatgacgaaagcagttgataaaggtatgattattggcgaaacctaccttgaaagcaagtctggcggtaaatctggagattttcaacgccaattagatcaataaattattttgtaagctcatgaatcagatgatttaattctggtttaatgagcttttctaatgctaatttaactgcgcctgttgatcctggaatcgaaaatatcaatttattattaactgtacctgctacagcacgagacaataatgcacgtgtgccaacatcttcaacataactcaaatatctaaataattccccaaagccttctatctctttagttaaaagtggttttactgcttcaatcgtcacatcacgttttgcaatacccgttccaccagtcgtaatgatgacatcaatatcttcttctaaccacttcttcacctgcgtcgtgatggctactttttcatctttcacaattgtataatgtgcatcgctaacttcaacattatctgcttgtaacagttggcgcacgcattgaccacctttatctgtatcaaagtttctagtatctgataccgttagtacggctgctttaactgtacgattcaatttaacgttttgatgttcgcccataatattacactccttttatcttatcttttttatccaaacaataaattcattagatgtgtggcatctgatgtgcgtgtcatgccatgtattaaaaaccttccacctttaaaagcaacaatgcggtgccctttaaattcaaacataaccatatatgaattactgcgataatttagttgatgctgttttaaaaattgaacaagaatatcgtgtgtaattgatgcattttcatactgtacagtgtctctaccacacaatgttgcataacgttgttcatttttgtttaaatacggataacttggtacatctccacaagttgtacaggctgaacgttgcattttactgaaaccaaatgaataatgactaccttcccaaatatcgccataagttatttttgtgtcaattggttgatccgttaatactttcatcgcatctcttaattgtaaacttgttgccatcgtcacggcaggttgaatgactcctactgtatcacatgttaaatttaatgctggcaattgtggtaccaaacagttaaagcaaggtgttttaccaggtataaatgcagcttctgtatatgtactctgtacaacacctccataaatccaaggtatacgatgtttatatgcaaaatcattaatcagttgtcgtgtttcaaagttatcggttgcatcaatgataacgtcaacgtcctgtccatgtgtttccaaaaaataataatccacatgggcaatataatcatcaatatcaacatcactacgtaacgctagcaaatgctttttagctgcaaccactttaggcatcattttcaaagcatcttcttcagtaaataatgtttgtctttgtaaattactaaattcaatataatctctatcaacaatgattagtttagcaatgcctgctctcacaagaccttcagccacatgtgtacccaatgcgcccataccaataatcaacgcgcatttttgatttattttgttttgacctatttcacctatttgtttaaataaaatttgccttgaataacgttcttgactcacattaagttatcctttctatttatccttactttcattatatgacgtgcgtcaatgtctctcaaaaattgcgcctaaaaaagagtttaaaacatcattaaaatgctaatagaagcttgcacttctacatttttaaatacgttctaaactctttcaaggcaaatgtatcattaaccaattgtaataatttcatgagccatttgttctgcttcatagtttgaatgtgtcacaaatatgattggtatttgccattcgttgaaaatacgtttaactaatgtaatactctcatcttttgtagtgtcatccaaactagaaaaaggttcatctaataaaattaaatctggtttcgtgctaagtgcacgtgcaagtgctacacgttgtgcctctccacctgacaatgtcataggatattgtttcatcaaatgatcaatgtttaaagtttggattaattgatcgatgtgttcagatggttcagccataaaagtaatatttttatagaccgtcatattaggaaacaattggtagtcttgaaacagatatccaatacgtcgttgttgaattttaacattcacgttttttgccgtatcagtaagcaattgcccattcacttcgataatagcttcatctgctttacgtaatccggcaatcatatttaaaacagtagttttaccaatgccagatggaccacgaactgcataaatttttggttcagtatcatctatattgatgcgaattaaagtattctttaattgatattttaaattgattttaagcatctagtcgacctccttatatttatctttattcaataaattaattgtagatataaccacaatagagaatgcgactagcactaatacccataaccacgcttcattttctctaccttgttccactaagaagtatatttctaaaggtagtgtattcgttttattgggaatatatcctgcaaccattaatgtagcaccaaactcacctaatgcacgagcaaaactcatcattatacctactaaaatagagcgtttagctaatggtaaaattaatttgaggaaaattttcgtttcacttgctcccatcgttctagctgtattaatcattttcgtgtctatacctctgaagccttgcacagtatgttgatacattagtggaaaactaacaatgacagatgctatcacagcacctgtcaaagtgaatactacaggtaaatgtagtacattcgcaaagaattgaccaattggtcctcttggcgagaagatgattaatagaataaaacctaataccgttggcggcaaaacaataggtaatatcaataaactttccaatactttaacccacgaacccttacgacgatacaaccatttagatataaaaacacctaaaatcgttacaataatcgtactgattacagcaactcgtattgatatccaaaaaggtgttaagtcaggcatggattacaactccttatgctgtaaagtgatattcttttaatatttctttagctttatctgattttaagaattccatccactctttagctaatttactatctgatgtcgcaccagctttatatgtgattggtttcttaagttctacttctttaattacttttacagtatcaatttttttattttgtttatataagtcagttttatatacaaaaccttgtttcgcattacccttttcaacataatttaatacttgttttacatctttagcataaacgattttactttcgacctctttaaataagttattgttatctaaatactgtttcgcatattttcctgctggtacagttttcacttcacctaatgctaatttatcatttccttttaagtcttttactgaagtgtaatttgaatctttatcaccaattaatactagactatttttcgcatatttatatgtatcatgtgctttattcttgtcttttaatgcatctacatctttagtatttgcagacataaatacgtcaacaggtgcgcctgattcaatttgttttcttaatgctcctgatccaccatagttaaatttaatatcagcatttttatgttcttttttaaattctgatgctaatttttttgtaacatctgttaaacttgctgccgctgcaacttgaatttcttgttttttcccattgtctgctgcatcttttttgttgtcttgattatcattagaattagaacaaccagctaatactaaaaataatgccattacaatagctataaaacgtttcattttcattatgaaatacccccaattattaaatatttacactctcattatacacttaacaatatttttgaaaagaagcgttttctctttaaataatgattcaaacaattgtcaaatttgcataagattgatatttattaattaatgacttagtgtgtatattctcgaattcaatttaaatcaaactgattgctcactattaatttttattaatcaaatttcagttttaagcaaatatgttaaaatattaagcatattgatttaaaataaagttcaagctaattaaaggggttagataatgaacaaagatgtatctttaggtcaaccaattgttagatatgaagatggaaaattattcaatacaacagatcaatatgtgacagaatttccacttacaattatggtgaatggtgaagaatttgcgactgttatatgcagtccaacaaaccttgaggagttagtcattggatttctggcttcggaaggtgccattttaaagcgagatgaattaaaatctgtactgattgatgatagtaaaggatttgcccatgttgaactgaataaagatttaggcgatcgctttcaatattccacaaaacgaatgattgcatcttgttgtggaaagagtcgtgagttttattttcaaaatgatgctgctatcgctaaaacatctatgtctaaaatcaccttaactccaatacaaattattaacatgatgactcgattacaaagtgccagtcatatttaccaagaaacaggtggcctgcataatgctgctataagcgatggtttgacattttttgtacatcgacaagacattggtagacataacgctctagataaattatatggattttgtattcagcgacatattactgtccgagataaagtattaattttcagtggacgtatttcatcagaaattttaattaaagccgcgaaaattggtgttggcgtcattttatctaaatcggctccgacaacgcttgctgtaaccttagctaatgacctaaatattacggcagttggatttattcgaaatggtggctttaatatatacagtcatccagaacgtatcattgattctgaacaataacatattcattatagtgtgtcataatgaacgatattctacatgaatcaacaatataaaagcactatttttataagtataagtagctcaaaacaatttaaaaagcagtaagttgatttctactcgaaaccagcttactgcttttttattctaatacaaacctatcatcaatcgttaatttccaatatcttcttttaatatttgataacaaaatgattggtaaacataaccttgctttgcatacatatcttttgctgtatcttcaccatctgtaactaatataaccggtttatgatttctagatatagcgtattcacctactaatgactgcatggtagaaccgattccttggtgcctaaattgttctaatacaccaaatccatctaattcaatgtaattttcactttcaatgacatctacaacgccaataggttcattatttaaataagctactaagcgtttaatcgcatctttttgataatgttcccttatcatttcttcatgtgcatctgcatagtcttttccaaatggcaaactaaattgatatgcaacttttaaataggcatctatatgcgactcgtcaacgatggcaatttcaacgtcagcgttacgcggtaaattggcaagcgcatcactttctatggcatacaattccataatacctagttcaaaattcatatctttaaacatagccatccaatgattatcaagttgttcattttctgggaaactaaatgcataatgatttgaaccttgatttgtatgtaattgatgttgacgctttaagtctttcaaccattgctcttcggtaggcatctttttatataaccatgtgttgcttgtgtatcgttgtggaaaaataggcgttaaataaatcaactgcttgtcgctattttcaaatattgtaccgtcgcaattaatatctgacatacttatatgagacattggcacctactcctttcactttcaacaattgaaaaacaacttatccaattactttactatcttaaatatgattattttaaacccataatttgacgaaactgcgagtgattaagtaaagctgtaccaatcaaacttgctacaattgcttttaatatatcaccaggcaaataggctaatgaaattgaaatagctttcgtaaatggtatgttaataatcatgcccataatcaatgtaccaataacatctaatgctataacaccaaaaactaaaataccaacgaataaaatccagaaattaatttcattgatgaatctatcacgaatcgcaccaatcatgaatgctacaactggatataatagtaaaaaccctgctgaaggacctgcgaatacaccaatgccaccgcgaccgcctgataacagtggcaaaccagcaactactaataataaaaagacgataacacttaatgtgccatatttacgtcctaaaatcacacctgctaagaaaataccaatgttttgaagtacaattggtactgaagaaaatggtagtggaattaccggtaccaatcctaaaatagcgataatcgctgtcattaaagctgtatatactaactgttttgttgtcattttttacttcctttcgtatttcatgaccattattatagcaccattgtaaactttaagaaacgaaaagtttacaataagttgttctatataaattaaaaccttaattattctacacagctgttaatttacttttttagcaagtgcagttatataatcaaaaaatgcgttgttatcgacatgatttatgacattaattttgcgcccatctttacactcaaatgtcttaccttgacttggtccataacttattacatctacttttttctcaattgaatgaaccaagtccttgttaccaatataagcagtcgttaaaacatcccataaaaagtaagtagaatttgttataaagtgcgttaatggtggtaccgctgcataacttactcctaagaaatcaatgcccgtatattggcgttcattcgcccatctttgtctaacatctaacgttagcggtacttgattcgtactttctaaagcaaccatatcaatctctatatcgctatcaaaaacaattttaaccgcttctggatcccaatatgcattccattctgcagaaccatcatgctcaggttcttcaacatttccttttggtaaaaaggtaccacccatccaaactaacttttctatatactgaacgattgatgaatctttttgtagtgcttttgctaaatctgtaagcgggcctgtaaatagtaatgttactttttctgattgtctctttaaagtttgaataatgtcttcaaaggcttctttgtcgcttacatttgaagcaacatgtttgactggctcatttaaaattggcaatgcgtccataaaaaaggcatgcatacgccattctttaggaaatggattttttcctcgttcatatgatggcgcaacttgaatatcttcatttgaaaaacgattaataatttttactgatgcgctcaaagatggctctaaataacaatcagcaccaattgtactgacccctatcaaatgaacgttttccatttgtaataataaaaatagagatactaaatcatctacaccaccatcatggttaaaataaactttcttagtcactcgaaatcccccttacatttcattttccattaacaatattatgtttttataaaacgttgtaatatatctttctacaaaatcataacattctgttgtaatccttttaaacctcttctttaattgatagccattccctgatatgccttccataaagtatgcactaaaataattatgatataacttattaatgaagagatacattgagctattttctcaggtatactactttagctgtaataatactaatctatcattaattaaattgaatgataacaacggcacttattatttttaaaaattacaaatatctaactttctagctataaaaataagagcctaatacaatatcaaaagattgatatgtctcagactctaatttcactggcttatatagctgaattattttgcagctttaattaatttttcttttaaatctttacgcatgaaatctaatgtataaggatcgttgtaccagtatgtaccagcatcaactttaacaatatgtccttctttagtagctttcaaattcttccacatgtttgttgattcatatcctggtgtaggtttaccttcacttgtactcacaatgtaatcaccagcatatttttcaatttcttcttgtttcacttcagcccaacctgcttttgcagttaacttttgttgttctggttgcatttttaaaccaaatgcttgatataatacttctccaccacgaccccagttatcgccgtaagtgtataattttttatcaaattcatcaaacaatgacactgttgcatcttgtccaattgcttttttaatttctttaccgtctttagcagttgtttcttcccaatctttcttccaagcttttactttatcttctttaccaacaattttccctaacatttcttgttgttctaaatatttatgcttattatagtcaacaactactgttggtgccactttttgatattttttaatgtctttgtcagtagagtatacaataattaaatctggcttttctttagcaactttttctacatcgccatcaccaatttttgtaacacctttaaatttatcttttaacactttgctttgatcgacttgttgatttacagctacaatgtttgcacctaattttttaagtccaccagcatatgttggcgctactactgcaatgcgtttagggtctttcggaatatctactgttttgccatcgtccattttataagatttagtttcagctttgttatttttttcaccttggttcccacacgcagctaacactaataacataattattaatggtaataatagttttttcataatttcctcctattgaaaatgattatcaattatttcaaaattatacaagattgcatatacatttacaatagctagcgttatttatttttttattttcacaaaaaatttagcaaaatatcttaacatccttataaattcccacaaaaaaggtaaatccgaacgtcaaatttcatctctttatgccaatcagcaatcgatttacctttttaaatttaaaatgtatctgtaatactcttagcaatatttgtgtatgctgcatcttccataggtggattgtgtaatcctgcacgcatgtcacgatagtaacgttgtaatggtcgattcatttctaagcttttagcaccaactattctcatcgctaaatcaatcacttcaagcccttgattcattaccatcactttactcgcacttgttgaatttcttatctgactgtcatctttatattgttgatagccttttgctgtactccataaaaattgtctcgcacataacaatagcgtttccattttccctaaattttgttgcacagttggcaatgttgcaatcgttccttcaatactattagggctatgttggattgcaaagtctacagcataatttctagcagcttgtgctatacctaaataacagcttggtatatgcaatatccaaccatttggcgctttacttttctctgtttccactaaatgttttaatggtacttttacatcatttaatattaaatcatgactttctgtcgctcgcatacctaatacatcccaattatcggcaatttcaactcccggcaaattcctgtccactaagaaaaaaccaacactttctaattcttctatataagcagcaacaataatatgtgttagtgctttactcattgatgtatatgtcttcacaccatttaaaatatacccatcatcagctttaacagcatgtgtacttggtcttcctcctcttgttggactacccatttcagcttcactaactgctctattaactaatgcaccattattaatttcaacagcaaattgctccaacatatcttgagaccataatttttgttcataaatttgtcctacgacactcacatgccaaccaatagataatgctgtggcaccatcaagttcgcctaaaaatgattgcaaaataaccatgtcttctatggtcgcaccttcaccaccatatgcttttggtaacgttaattttccataaccttctttaattaaccattcaatatttttatatggaaattggctatgttgatcattatattcagctttagccttaaatgtatctccaattactttgaatttttcaatccattttctttgaatttccgttgttattaaaaaggaattatccatatcattcatattagtcaccccacacaacacacaatataaattatttattcctagtttaacactcgactttaaaaataaaaaggaacgtgctgtgaccaattaaaagaaagctgataattcgattaagtatgcacttaattttatccataaaaatacaccttaaactatacaattcactgtatggtttaaggtgatattcaaacaatattaggtttgatttaactatcaagcatctactttgtcatgtttaataccagcaaataataaaatccatgtcacaataataaatggcaatgttaatgcaggtaagccaaacggttcaagcaatgttgttgtacctagttgcaccactactgttaataacacacctaaaaaagtcgaaatataagggttaatcgctgttttaaatgtataccctagtgcgattgccattaatacaaagttataaccgaataatccctgattaatatcttcataattaccgcctaatagagctacaatgataaagcttaacaaactagctataacagctaagagtgctgcttttcttgatgctatcaatatgccgattaaaatacatacgccaccaattacactcgcttcgataaatacttgactgaatccttcaaataatgactgaataaaatgtattcgatcattgttgctaaatttaaccgtttcaatgttttgaggcattaactttaacgaggtatctacaaatttaacctgtcctgaaagtaaaattgtaaaccaagtcacaatgacaaaaggcatcgtcagcatcggaactttatatggtcttaaaacttctctcactgcagcagcaactggtaacgttaataaagttgctatcattgttataacaatatctaatcctgacttatctaaaaagattgttaacgcaatggcagttaacactggattaaatccggctaacccatcattaatctctgcttcactataattaatgtaacgtgcaaatgcataagctatgatactacctatcatagctgctaatccaactgtccagtcggccacaaataatccaatcaagataaataaaccagtccacttattactaattaacactacttgagatatatttttcaaaagcacatctatcattttcaaaatgctcaccctttttcttgaatgtttactcattaatatactaccattttacaaaaagttatattaaaaactctattttacaaatcctaaatatctttcgctattcgttttaatcataatcatatatttttaaatacgaaatagtaaatttattttttactgtttcgtattaaactttgtatattacttgtttatcacaacaattaggattaatataaattttgtaaattgtatctaatatgaaattgggggttttaatttgcattttacacaacgagagcaagacaaattaatgattgtagtggcggcggaagttgcacgtcgtcgtaaagcacgtggtttgaaactaaatcatcctgaggcattagctttaatcagcgatgaattattagaaggtgcacgcgatggtaagaccgttgcagagttaatgagttatggtagacaaattctaaacaaagaagatgtcatggatggtgtcgaacacatgattacagatatcgaaatcgaggctacgttccccgatggtactaagttaatcacagtacatcaccctattgtttaaaggaggcagtcaaatgataccaggagaaattattacaaaaagtacagaggttgaaattaataaccatcatcctgaaacagttatcgaagttgaaaatacaggagatcgaccaattcaagtgggctcacattttcatttttatgaagcaaatgcagcattagatttcgaacgtgaaatggcatatggaaaacatttagatattccagctggagcagctgttcgatttgaacctggggataaaaaagaagttcaattagttgaatatgctggcaaacgtaaaatttttggttttcgtggtatggtcaatggtcctatcgatgagtcacgtgtctatcgtccaactgatgaaaatgatgaatatgcaggtgtattcggagataacggtgctgaaaacgtgaataaaaaaggaggaaaaagatcatgagctttaaaatgacgcaaaatcaatatacgagcttatacggtccaactgttggagattctattcgtttaggtgatacgaatctatttgctcaaatagaaaaagactatgcggtttatggtgaagaagctacttttggtggtggtaaatctattagagacggtatggcgcaaaatcctcgtgtaacacgtgatgacgtgaacgttgcagaccttgtcatttctaatgccgttattatcgattacgataaagtggttaaagctgatataggcattaaaaatggttatattttcgccataggtaatgccggcaacccagatataatggataatgtcgacattattataggttcaacaacagatatcattgccgctgaaggtaaaatcgtcactgctggtggtattgatactcatgttcattttattaatcctgaacaagcagaggtcgcattagaaagtggtattacgactcatattggtggtggtactggtgcttcagaaggttctaaagcaacaactgtaactccaggtccatggcatattcatagaatgttagaagctgccgaagggttaccgattaatgtcggttttacaggtaaaggacaagcaacaaatccaactgcactcattgaacaaatcaatgccggagcaattggattaaaagtacatgaagactggggtgcaacaccatctgctttgagtcatgcattagatgttgctgatgaatttgatgttcaaattgcattacatgcagatactttaaatgaagcaggatttatggaagacacaatggcagctgttaaagaccgtgtacttcatatgtaccatactgaaggtgctggtggcggtcatgcgcctgatttaattaaatccgctgcattttcaaatattttaccttcatctacaaatccaactttgccttatacacataatactgtagatgaacatttagatatggtaatgattactcaccatttaaatgcggctattcctgaagatatcgcattcgcagattcacgtattcgtaaagaaacgattgcagcagaagatgttctgcaagatatgggtgtattcagtatgattagttccgattcacaggcaatgggccgtgtaggtgaagtaattacacgaacatggcaagtagcacatcgcatgaaagaacaacgtggtcctttagatggtgattttgaacataatgataataatcgcatcaaacgttatatcgctaaatatacaattaacccagcaattacacatggtatttctgaatatgtaggatctatcgagccgggcaaactagctgacattgtcttatgggatccaattttctttggtgttaaacctgaattagttgtaaagggcggattaattaactctgccgtaaatggcgacgcaaatggttctatacctacatctgaaccgatgaagtaccgtaaaatgtatggtcaatacggtggaaaccttacaagtacgtcaatgacattcgtatctaaaactgcttatgaaaatggtatcaatcgtgcattaaatttaaaacgcatggtgcgtccagttaaaaatattagacaattatctaaagcagatatgaaaaataacagcgcaacacctaaattagacgttgatccacaaacatatgaagtatatgtagatggagaaaaaattacaagtaatgcagcaactgagttaccattaactcaaagatatttcttattctaggaggaacatagaatgattgttgaagaaatccaaggcaatattgccaatttgtcaaattcagaaaaacaaaagcacgtcgaaaaagtataccttgaaaattcagatctcgttaaacgtattcaaagagtcgtaacagatcatggcactgaaattggcattcgtttaaaacaacctattgacttacaatatggagatattttatacgcagatgaccataatatgattattgtggatgttaattcagaagatcttttagtgattcaaccaagaacattgcaagaaatgggagatatagcccatcaattaggaaatcgtcatttgccagcacaatttacagagactgaaatgctagtacaatatgattatttagttgaagatttattaaaaagtttaggcatcccatatgttagagaagaccgtaaagttaataaggcttttagacatataggacattctcatgattgatcatacacacttaagattatttcagttctgtgattcacagtttccaacaggtgctttcagtcattcatttggtcttgaaacatatattcaacgaaatataattcatgatgatcatacttttattgcttggttaaaaatgtttttacaagagcaacttacctattctgatggtttagccatgcgtttagtttatgatgctttggaaaatgatgatacacaaaaagtattacacatagataaactgatgtttgttcaaaacttacctaaagaaacacgtgttggtgcaaaacaaatggggactcgcatggttaaattggctttagaactttataatagcccatggattgcttggtatcatcaacaaatgcaagataaaaaagcaaagttaaatccagctatttgttttactatgctaggtcattatttaggtgtagatattgaaacgattattgattactatttatatcaaaatgtttcaagtttaactcaaaatgctgttcgtgctattccacttggacaaactgctggtcaaaagatagttactcacatgattccttatatagaagaaacaagaaagcagatttccgaattaaaagaagcagattttggcatgacagcgcctggtttagaactaaatcaaatggcgcatgagaacgtcaatgttagaattttcatatcataggaggttataattgtggcaaatccgattaaaattggtattggtggtcctgtaggtgcaggtaaaacacaattaattgaaaaagttgtaaaacgtctttcaaaagaaatgagtatcggcgttattacaaatgatatatatacaaaagaagacgaaaagatattagtaaattcaggagttctacctgaaagtcgtatcattggtgttgaaactggtggatgtcctcatactgcgattcgtgaagatgcatctatgaactttgcagcaatagacgaattattagaacgtcatgacgatatagaactaattttcatagaatctggtggcgataacttagcagcaacatttagtccagaacttgttgacttttcaatttatattatcgatgttgctcaaggtgaaaagattccacgtaaaggtggtcaaggtatgattaagtcagatttctttgtaattaacaaaactgatttagctccctatgttggtgcatcattagaacaaatggctgaagatactaaagtatttcgtggtaaacgtccatttacttttactaacttaaaaaccgacgaaggtttggatgaagttatcgattggattgaacgtgacactttactcaaaggattatcataatggatgaacaacaatggactgggcaacttgatttaacagtgttttttgatggcaatcgatcagtgtcaagagatattttctttgaaaaagcacttaaagtgatacgtccagtttatctaaatcaatctaccattcctacattttatatagtaaatgtaggtggtggctatttagatggagatcgttaccgtatgaatgtgaatgtcgaagataacgctaaagtgacattgacatctcaaggtgcaacaaaaatatacaagacaccttccaatcatgttgagcagtatcaaacttttaatttgaaagataacgcatatttagaatatgtcgctgatccaatcatcgcatatgaaaatgctaaattttatcaacacaatacgttcaatctcaataattctagttcattattttatactgatattttaactcctggttattcaaaaactggcgaagccttcaagtatcaatatatgcatttaataaatgaaatttatattgaagatgagttagtcacatatgataatttattattgaatcctaataaacaatcgatcaatgaaataggttatatggaacattactctcattatggctctgcttacttcatacacgaagatgttaaccaaaaactaatcgattcagtttatgaaaccattagttcttatagcaatacattcgattgtcgtgttgctatttctcaattgcctacacatggttttgcagttagaatttttgcttatcgcacacaaattatagagaaaatacttggaaccatccaaagctatatcgcagaaaatatttatgatcgtaaacttgattttctaagaaaatattaaaataaaaagactagtgtaccttgtttcaagcttaataagctgaaataaggtatgtctagtctttaactttaattaaagcatcttcaatatttaaattttaagttaattttatgtcccaatgctgaataaataacttcgttttaataaattgttatcgttcaatgttattaaacgcaattaaccttgatttaatttttaatgtattcttctaattctgaaatcagtttttgaatatttgctttttgtgtatctgtaacataaacaataactgttctttcgtcttgtaaacttcttttctttgataacaattttaaatcttttagcttttgtaaagctttagttaaatagtaaggtttgaactctgagcacttagcaatctctttagatgagatttcgttagactcacttcttaaaatatgatttaaaatataaatttcttcatagttcaaattgaacttcttttttgtatctctgaaaaacttcttaacttgaaatgttgcgttgactaaatcattaatgtcattaattttactcattattaaaccactcctctgatgcacatcttgttgtagcaaggttcacatgtaatttattaaatcgaaactctatccaactatgttataaagttcattctaaacaaataagtataaaaattcaatatttttattactagaatatggttaaatacatttatttcttataataatttgatgtttaagatattttgccaaattgaaaattattagtctgaatattttgtatcttaactgatatgtaaacttttaaaattttaatctatatcaacgtgtttgatttgatattttttatattaatttgatggcttgctcacaaaatttataaaatataaaaaaagaagagctttaaatcataacgcatgccatttatctttaaatgcaatgagttatcattcaaactcttcttatcaacctacatacattgacattatactatcatatgttgttttacgtattcaacaaacatttcaacgttatcacttttaatatcatgcattgggacattaccaatattaaatttgaacattatagtttgaccatcataatctatcttctctatttcattataactaatacttctataataaaattgaccattcatatctacattcataattaatctttcatttgttgctataaatgccccttcaaattcattcttaccttgaacttgatactcaattattcctagcactgacggaccctttttttcagttggaaataaatcatttggatttacattatctaaaatcataatatccctcccacttaaaactataaactattcttcataggtatatgaaatacaaaagattaactatttattattaagcttaacttgtattcccttttcaagataattataacatgcttgaataagcatagtgactttagaaaacttttcccgcttgattgttacaataacacgcctttcatctaattcacatctctcttttttaactaatcctttcaaaattaaacactttaaaatcggactaaccgcaaatatcgggtgatggaattcaccctgtaattctttaaccgtcaattgacctttatgcagatttaatattcctaaaacgtataactcttctaatgataattgacacatatttaaataacactttagatttcgcaataattcttgtgacgacaataaatacgatacatagtcacaactaaaatcaaatgtatattgaccaaaataacgttcaatatagtcacttagctcattattcatatattctattttatctatatgcattttattaatcgaaacagtcaatttacgttgatccctttgatctctttctttcaatagccattgatgattgtttaaataacttaacatttgaagaagtgccatcttagattggatttctttcatttttaataacctatctattgaagcgctattggaatcagaattatcatatttaactaatagatttaatagtttcacttgagtcaaagtgagatgaaatgaatatttcaacatatcattaatgactttcaacattagtatgtgtgcagttaaacgcttaactttaaatttagacatctttaaaacctctcttaaaccatgcctatatctcaagatgatatttcaaatgaacaatactattgcttgagatcattaatgaatgatcataaatatttctttctataaaattagctttccaataactgtgttgttgcataatatcattcacaagtacaccattttcggaagtatgattatctttatctatacttaaaacaatttgtttagttttagcatggctaaattgttgaagacccttacacgataaacgtatagcgtctgaattctcatttaacaatgcggctggcaaacaaatgacacattgtacttcatgtttgaacttcgttacaatcatcgtgtcattttgataaataacaatccctcgtaattgattaagtatatttatgataaaaatgaatattgataatctagtcaaatttatttctttgctcgcttcacttataattgacatgtgcataataagtcctcgaaattttgtataatttgtcaaaagttcagtaaccttattaatatcagacattgtgattttttcttttaagtcattattctcattaatcaaatctacatcacatataattttagaacgtgcaatagacacctgttctatttgtcttagcggtaagataaaatagtctattagatgatcgatttctttatcatagcgcgtattcaactcatttggttccagatgatatattaattcaaatactcctatataattatctattaaacgtttcagtttttgaattgcagtagtatttaagtcgttaattaaaaatgcaatcttacatctattactctcaaaagtcatattaaaaattgtagctactagcttttctatcttgcctctttcagtactcgttaacaattccttatattcatgtttaatacgaaatactacatttacattgtaattcactatcttttgaagtaataaagtgatttgttcaatcgatagctcattgcttgtgtcgattgtaacaattatatgcaagttttcaggattaacacctaatctttgaatgatttgtttaatagtataataatccatccaataaaaattacttcctttaatatagatgtttttaggttgatacatttgactcctttttgtaggctcaaaaggtatatcaatcttgcgcatacttgaagaactttgattagtatcatcaaataattcaattatatttttatcaatttcaactaattgggaatggttaattgaatgagatgttggactatttctttttctaattaatttaggagtgtcaccatacgtttctttaaagaggtgtataaaacgagaataatgattaaaaccatgactacttgcgatttcttcaatgggcttcttagaagttaaaatatcaattaagcaatgctccagtctaatatgatttaaatattgaataaaattactataaggtgtcgctttaaacatgtcacttaaagctttgtttgtgatactaacttgattaatgacatctttcctatttatctttttatggtggttgtttgttaaataatcgtgcacttcttcggctactaaatgatgactaccatcataggtatttaatgacattaattcaacacacatgtaattaataatcttatcattagcattataaggctgttgcttaattttgttgtagattaaattcttaattaagattctaaaagtgcaagcaacctcatttgttaatatcttgccacgcatcatatagtttgcattcataaacttcaaaaatgtctttgcacttacctcaacaacacaacatacactatcatcatgaccatcaatctgatacaaatcattcaacataataacggtgacatcatttcttttcacatcatattgttgtagattgattgaaactacacctgtaccttgaagccaatatataatttttaagtttgcttccttcacactactcattttcatacttttaaaaatatgtagtgaataattatctgtcatcttacatcctcacatatacaaatatattgatttactcctgtttgtctttctcaaatcaattgtcaacatctaatattcactaccaattatatcgccacatgttttttagcagtaacaaaatataaatcgattatatcaaataatacttttattaaaacatttttttatgctaaattaggatattttatccattaaatatacatttttatccaaataccaaagctttcacaatcatagaaacttgatcgttcgtgtcgaatttttatgcattttctgattaaaagtccgatattatgcacaaaatatacatttagaattttcagtaatattacaagtttataacagccttattttcgcaacattcagttttcacaaagaatgccgtagttataagttttgcaaaatgcaaatttctatacttttaaaattctattgtgtcaagatattagcaaaaaattacaaaacgttaacaaagcacacaaggacgctaatttctgttatagtctttcttgtcgtttaattacgagagataacttataacattaattttgtcacacggacattacgaaaatattttagatttaaaatttttaggaggatatttttaaaatgaagaaaatcgctacagctactatcgcaactgcaggattcgctacaatcgcaattgcatcaggaaatcaagctcatgcttctgagcaagataactacggttataatccaaatgatccaacatcatatagctatacttacactattgatgcacaaggtaactaccattacacatggaaaggtaactggcatccaagtcaattaaaccaagataatggctactacagctattactactataatggctacaataactataactacaacaattacaacaacggttatagctacaataactacagccgttacaacaactactcaaataataatcaatcatataactacaataactataatagttacaacacaaacagctaccgtactggtggtttaggtgcaagctacagcacttcaagcaacaatgttcaagtaactacaactatggctccatcatcaaatggccgttcaatctcaagtggttatacttcaggacgtaacttatacacttctggtcaatgtacatactacgtatttgatcgtgtaggtggtaaaatcggttcaacttggggcaatgcaagtaactgggctaacgcagctgcaagagctggttacacagtgaacaatacaccaaaagctggtgcaattatgcaaacaactcaaggtgcatacggtcacgttgcatacgttgaaagtgttaacagcaatggttcagtaagagtttcagaaatgaactatggttatggcccaggtgttgtaacttcacgtacaatctcagctagccaagctgctggttataacttcattcactaatttgtgatgaaagtgaattaagccaacaaggtttcaagagccttgttggcttttttaatttctagacatcaaaaaatcggattggtggaaatctcaaaacttcgatttccaccaatccgattcactctgtaataaagaataaacaacatacagccattgacacacccaaatttaggcgcgtcaaatcggctatacattgataaatttttagttaaagtacttacaaatatacttgccttcaaattctcaattaatttagtcattacaaatcatgacataaaacttacattacatatattaacatgttccgctacaaaacatattcagtatatgtatagaggatatttattctaagttaaaaccttttcaaattataaccgctacaattataaatgattaaagtgttccaacatattatatatattccacgctcacattaagttaaacgtgaattcgatgactttttaatacctatccctgtaaaaccatagataattgctataattgcgcataaataacatggtactgtccatatgaaaaattcttcaacagagacatgaagttgattcgtatagtaaatacccgatgttccccatggtattaaaggtaataccatcgtacttgagtcttcaagtgttcttgataaaacggaacgagagacttggtatttttcgaacaaatctttcattaacacaccgaccataataattacaatcgaagcaacacctgcagcgaatacaagcgtaatacaacaaataacagtaatacatattaaacttcctacagaatggatgcctttagaaatagtagttaataagacttctaaacatcctgctttttctacaatacctgcaaatgcatatccgcaaaatatcgttactaatatttgggtcatactcatcataccaccctgttctaacaagcttttcacactggatgaaatatgagactgatgtatcattgagtcgttaaaaccactaaatgttgctttgaaaccatttgtcattttgaaatgatgattaaaagtccccactataatggcagaaaagcttgatattagcatagctggcactgtagccattttaaatagcaaacaaacaatgatcacaattaagggaacccagacccatatgttaatttgataaatctgtgcaagctctgataacaatgtttgaatctgcttatcatttgaatgtcctttaaattgaaatccagcaataaaccatactaataaaccgatgattgacgcaggtattgttgtccacatcatcgaatgaatgtgtttaaatatattcactttagtgacaagcgccgctaaattagttgtatctgataatggtgacattttatcgccaaacacagcccctgctataatagcacccgctgccatccctggaggaacccacaattgattaccaatagaaataagtgcaatccctgcagttgatgcagagccccatgctgtaccagttgctacagatgtaacagcacttataaaaaaggctgatattaaaaaatagcttggattcaataaatctaagccataataaatcaaggctggcactgtgccagaaaacatccaactgcctactataattcctaccgctagtataattaaaattgcaggcattgcagtatttaaacgttctgcaatgcctttttctaaatcttgccatgttaagccgacacgttttgcaatccatgtggcatatgctgaggcaataattaataatacttgaattggaatatcaaaaaacacaaagcctgttacaacaacaataaccattacaatcattgtcgaaattgattctaaaaaggttggttttcttgtcatcatctatcgtccccttcgcttattgatgagaaacctcttttcttcaatttattgcttttgcataatgctatatccttttctatcttcaagccatcatttattttaaatatttttctaaatcaagcttatctaagccaatggattcaactgttaaaccttcttcaaagaaatctctttctaagattgtcgatgcaatgacaattactgcatctatatttggtgtcggtacatcaataacacgacctaagcttgaccataatactaaaccatatgcaatatcttcagttaaatatctgctttctacatgatttggtcctggaatttgtgaaaatactgggcttgtattaaacaaacgatttaatggttcatcttctttatcacgttctaaataaccacgttcaatacgtgattctttagctgttgataattcaaaacctaatctacggcctaaatttaaacgttctaattcgattgcatgaagtaatctaactgtatgtttagtaattccttctttatataaagcgaactcaccagcataatcaatacgaccgacattcaataatgttggccctggatgcacttcaggattaccattttcaagatttgttttaattaagctttcctcttttactaaatgatcataaatacttgaaactttgtcataacaatcatttagacagcttctatcatatgttgaaaagaagatacgacgtacatttagagataaatcaactgctgcattttcaaaatcgacacgcgtaccatacgtcaacgtattagcttctgctaattgtggttttgtttcaatatgtctatcttctaaaacattcataaaacgaattgaccccattgctgcagccatgttgaagaatatcaactgattatcagttacatgctctgccattacatcagcataatattctatgtaagaagatggaataatcacttgaacaatttcagcatcttttaaaacatattccatatcatcactaatatcagtgaattttacgaaacgttcatcaccttcattattaaaatcaaatccgcccttttcgattgcgttttgaaacttacttatagattgattacgacaatataatttaacatcgtggcctttgctcaccatatctactgctgccgtaactgcgccatttcctgatcctacaattgctattttcataaacaaccctctttctatctttggttaaaattaaaaacaaattatacgtaagacaatataaaaatgatgcgaattcattacgcatcattataaatgttaagtatatataaccttaaattaacctatttaaacgccgacgtccaccaattatttttatttttaataattgtttaataaacatgtttatttttgattatattttgttatagttaaagataatattacaattttcaaaggagtgtctaatatgacaactgaaatgaacgacgtaacaaatcatcaaccgaatcgcaaatccaatgatgagaacattatggcgatgcttatctatttattaagtttattcacatctattattggtccactgattatatggttattgaaaaaagatgaatcgaaactagttgatcgtgctggaaaaaattatcttaactatacgatttcttatattatttggtctatcgttttagtcgttatcacttttataggcgttttcctaattgctaccgatattagtttcattatcattataggtttcatcattacatttatcggcattttatccatattcgctttctcaatattatcttttgtattcacaattattgcgtgtgtcaaatattataatggtcaagaatatgtaatacctttaacaattcgatttatttaaacatattacaaataaatatttcctattaattatctgttaatctcattgtaactttgactaatttttattacaaaattagtcaaagtttttttattcttttacaaatcaataacattccccacaagaagcattaattttgttaaagtaactattgtcatcaattcgagatgtgagaataaaacagtcgctacgttttatttataaaaaaagatatagaactttggaggactttattcatgaaaaaattaataacagcaactacgttaacagcaggaattggtacagcattagtaggtcatgcacaacatgcagacgctgctgaaaattatacaaattataacaactataactataatacgactcaaactacaacgactacaacaactacgacaactacatcatcaatttcacattctggtaacttatacactgcaggacaatgtacttggtatgtatatgataaagtaggcggagaaatcggatctacttggggaaatgctaataattgggctgctgctgcacaaggtgctggattcacagtaaaccatacaccttctaaaggcgctatcctacaatcttctgaaggaccatttggtcacgttgcatatgtagaaagtgtaaacagtgatggttcagttacaatttcagaaatgaattatagtggcggacctttctcagtaagctcaagaactatttctgcaagtgaagcaggtaactataactacatccatatttaatataaacacggtgatacatattgtcttgaaacttaattctagtacatatgtcatcaaaaaactttgagctttcctttataggagaagctctttttttgctatttttcgttgccacctacttatatatattttttctcccatattcataatattaatttttttcaatattattaactttaaaactacgttatctaatttaattgatccagttttccacattacaatattcatagtcctacagtgcctaagttatatcacctccatcaaaagtacacgcttacatcattgatacacaagacatcatgacatagttgtatactgtctaatcttctactatactaagataaaaggagtgatcttttatggaaaaagtttatgttgctggtgcaataccagaagtaggtttaaaacttttacaagaacattttgaagttgaaatgtatgaaggtaaaggattagtcgataaagacactttaattaaaggtgttaaagatgcgactgccttaattagtttattatctacaaacgttgataaagatgttatcgatgctggtaaagacttaaaaatcattgccaactatggtgctggttttaataatattgatatcgagtatgctcgagaaaaaagtatagatgttacaaacacacctaaagcatcaacaaacgcgactgctgatttaacaattggattagtacttgcagtagcgcgtcgtattgttgaaggcgatcaattatcacgtacaactggatttgacggatgggcacctttatttttcagaggtagagaagtatctgggaaaacaatcggcattatcggtttaggtgaaattggtagtgcagtagcgcgtcgtgcaagagcatttgacatggatgtactatacacaggacctaatcgcaaagaagaaaaagaacgagaaatcggtgcaaaatatgtagatttagatacactattaaagaatgcagattttatcactatcaacgctgcttacaatcctaaaatgcatcatttaattgatacagaacaatttaaaatgatgaaatctacggcgtatttaatcaatgcctctcgtggtccaatcgtgcacgaacaagcactagtgcaagcattgaaaaataatgaaattgaaggtgctgcacttgatgtatatgaattcgaaccagacattaccgatgacttaaaatcacttaataatgtagtattaacaccgcatattggtaatgctacatttgaagcacgtgacatgatgtctaaaattgttgctaatgctgcaattagtgccgttcaaggtgagaaaccacaatttgtcgttaactaataattgaatttattataatgacattataataacaagaacccccatatgttgagctttcatttcaacatacggggggtttcatattgttgtattacttttctttcgatttatataagaatttagtctgtccagctgctaatgcatttggcatcattttcataatacgatttctaactgcaacaactaaacgactacgatattgggcaattttaccgatttttctagagcgtttaattacttttgcagtatgtttgacacgtattttatcataacgctgtaatgctttttcaaagtcgtatgcgttaaaacaatttactaatacgatagcatcttccattgcttgtccagcaccttgccccatattaggcgttgtcgcatgtgctgcatctcctagtaaaatagtacgaccataaacaaaagatttgagtggtttcaaatcataaatattatgcaataagatacctgtttcactttgtttgtctaagatttctctaacttcatttggatagtgattaaagtatgcttgcaaatgaggtttaccaaacgaactatatttatgattgttttccttcgagttaattgtaatgaaccaatatgcttgattatttaataacggaacaatacctactcttccttttcttccccagtattcttttgcacaatccggatgctttaaatcaatatcatcaattaaacctctaaagcatgtatacccttgatataatactttactgtcagcatttacagattgtctcactttagaatgaattccatcagcaccaatacataaatcaaatgcttcactctcttgttccgcgaaatgtatggtaactttatctgtctcattatctatatgcgtgacttcatgatttgtaaatattgcatcatcttttacataagatttaataatgtcaattaaagtttggcgtggtaacgtcacattcaatgtattactttttaatttaacagtagttaacgggcgatctttgtcatctaacactgtcattgtagataagatttgcccagcatttttaatacctttagctaagtcatgattacctagttttttaagcacattatctccgataccaatcccagcgccaatttctttaactgactcatttttttcaaagactttaatagtatgaccttgttcttgtaatagtgcagcagctgttaatccaccgatgcctgcacctataattgctatcttcatattgtcacctctatatttttcattcttttctattttatcacatgcactattgtttaaaaatgactcttggaactaacgtttcatttttaaagacttaagtgtattatctgcaccattgtatattacatgcacatttagacagcaatattcatttacataatgtacatttgtaacaatgatgtgggagcttgggtcataaatcaatgtcctagggtctataatattatattggcagtagttgactgaatgaaaatgcgcttgcaacaagcttttttcaactctagtcaggggccccaacacagagaatttcgaaaagaaattctacaggcaatgcgagttggggtgtgggccccaacaaagagaaattggattcccaatttctacagacaatgcaagttggcggggccccaacatagaagctgacggaaagtcagcttacaataatgtgcaagttggcggggccccaacatagaagctggcggaaagtcagcttacaataatgtgcaagttggcggggccccaacatagaagctggcggaaagtcagcttacaataatgtgcaagttggcggggccccaacatagaagctggcggaaagtcagcttacaataatgtgcaagttggggtgggacaacgataaagaaatactttttctatagaaattagtatttcttatgcatgcgttttactcatgtattcctatttttaagtacacattagctgtggctaatgtgtaagaaccactacataataaatcattagtggctctttatcatttctgtcccactcccgcgttttttgttaggttaaaatccatttaactaacacactcagaatgcgctaaaggagctcgaaacaataaattgttccagcccctttaagcaccgatgtcttacttataatatgtttgtctaatatcatctttctttataccaaactgcttataggatttatccattaatttggcaattttatctgcccagcgaatatcactcgcatattgatgttgcgcaggattttctggattccatcgcatttgatataaattcagttgattgttttcaaaatattcattacgaatgaactttgcaccaccaataatcgccttatctggtgatgtccattgttccttttcagcataacttttcccacttcgaacagcactactatcaaatgctcctataccaaaaaagttgtaatagcgtttttttccatctttaatgccttttgctaattctgatttgccgttacctgtttctactaatgcatggctaacaagataaatgacattaacctcatatttttcttgagcttctagaaaaactttccctcgattttctaaaatccccttaccttttagcaattgattaacttcagattccgacattggcactttttctgtgatatccatatacttcaaatcattgtctttatgtgaaatagtcattgctttagcaatttcattattatttgcttcaacaaatttaccatcctcttcttttgtctgtacaatacctttcccttgttgcattgaaacagcctcatcaaaagagtaattcacatcatttttaaacaatttagtttcattcacgatgagtaatacagcaaaaacaactaaaataactatcaatagtagcgttgaagtgcgtaacttgaaatttttcttcatatagacaaaacctcatttttcttacttagacaataaaaaatatgccactacaatcgctaatattacgattaaaaaagaagcattaacgattactttcatcgttgttctatctctgaacatcatattaaagacaactagactaattgataatgaaacagcaaaaaaagtaatagctaacactaatttcatcataaatagacagactaaacctatgactaataatgtattagaaattacagctgacgtttttaacattctcgaattaatatgcactcaccctttttatttaaataacttacataatcataataatacatgatgtttcatagccctgtcgatggttgattatcaatagcacatgattttctcgattctcaaaaatattgtttaaagtttgatgaagactcggatacaaaaaatatttcaatataacttaaaacagtcctcctacaccgacatgcagcaacactgttatattcaaagacaaaaaaatcggaaagatgaaaagtaaaaaacttttacatcattccgatttattatagacccatattaatcttctcgagacataccttttagcatattaagcatatatgttaaactacggttcatgtcgtcatcttttaaaacgcctaacagacttcttacagatgtcttcgcattaggactcgcttgatttgcaacatgtaatcctttattaactttattgaggaagtcacttaaatctgatacattcaattcgcctaataaaaataccattgaagccatattagataatagtcctgtataaatatctttgttgagctcaacagcaaatttattaataatcacttgacgtcctctaactgcgccatttaaagcatctaatattttagcatcatctaatgttttaatgagcttgattgcttttaaaatactatctttgtttgcagcaattgcctctgtaacttcatttaaactttctaacttaatttgttcttctgatttttctaagcgtctaattttagaagatattctctcagccattatttatccacctgatttcccgggaaaacataatctggacgttcccattttttctgtacttgaacactgtactgcggatgacgttttttattgacacggaaattattagggttcaacggtgacttaccacgtttcgtaattacctccaaacgacagcttgtacgtttataagatggtgtatccgtgtattgatcaacatcactattagttaataagttaattgcgcctagatctccattttccatcgcatcattatttaatggaatatagatttctttacctttaacacgatctgtcacgtgaacttgtaataccgcttctcctgtttcagatatcaacttaacttctgcaccttcatgaatgcctctatcttcagcaagttctggagaaatttcaacaaatgcacgtggcactttgtatttaatcattggtgtttgataagtcatattaccttcatggaagtgctctaacaatctaccattgtttacatgaatatcatatacttcatcttgcttaaagtaattatcaaatgataatgggaataattttgctttaccattatcgaaattaaatccttctaaataaagtattggttcatctgtaccatctggatgcacaggccattgtaaactattaaatccttctaaacgttcgtagcttacgccagcatataatggtgttagtctagcaatttcatccataatttcgcttggatgcttgtaattccaatcgaagcctaatttattagcaattgcttggaatattttccagtcaggtttagaatcacctaatggtttcaatgcttggtataaacgttgaatacgtcgctctgtattcgtaaacgtaccatctttttctaatgaaggacttgctggcaatacaacatctgcatatgttgctgtaaatgttaaaaattcatcttggactaccatgaaatctaatttttcaaatgcagcttgtacaaagttaatatttgaatctacaattccagtatcttctccatataagtacaatgagtgaatttgcccatcatggataccttcaaccatttcatgattatctttaccagcttttggattcaatttaacgccatattctttttcgaatttagcgcgaatatcatccgcttcaatactttggtaaccagtaatcttatcaggcatacttcccatatcactacatccttgaacattattatgtccacgtaatggatacgcaccagtaccaggacgacgataattacctgttactaataataagtttgaaatcgctgtacttgagtcactaccaatgtcttgttgtgtgatacccattgcccaacaaatgacaacggactcagctttggcacattcttcagcgaacttaatcaactctgcttctggaataccagtagcctcttcagcgaatgccattgtaaatgtttctaatgacttgtaatattcatcaaaatcttcaacccactcttcgataaaggctttatcgtgtaagtcatgatcaatgatatatttcgtcactgcgcttaaccaagccaaatctgtacctggtttcggttgataaaaacgatctgcgcgttcagccatttcatgttttctaatatcaaacacatgtattttttgtccaaataatttttgagcacgcttcatgcgtgatgcaataaccggatgtgcttcggctgtattcgtaccaatcaatacagacattgctgctttttctaaatcttcaatactacctgagtcaccgccgtgtccaaccgttctaaataagccttttgttgcaggtgcttggcaatatcttgaacagttatcaacgttatttgtgccaataacttgtcttgctaatttttgcattaaatacgattcttcattcgtcgctttagaagaagaaatgaatgataatgcatctgggccatgcttttctttaatagatgtaaagttatcagcaatgacgtttaatgcttcatcccactctacttcatggaactcaccatttttccttactaatggtttagttaagcgttgatctgaattaatatgtccccatgaaaacttacctttaacacaagtcgcaattttatttgctggagaatcatgtgatggttgtacttttaaaatttctctatctttagtccaaacttcaaatgaacagcccacaccacaatatgtacacactgttttagttttcttaatacgctctttacgcatttctgcttctgaatctgagattgcaaatagtggaccataaccaggttctgcttttttagttaaatcaatcattgccgctaatgaaccaggttccgtatcagtcatataacccgcattaccttccatgttaacttccatcatcgcattacatgggcatacagttgcgcattgaccacaagatacacatgacgattcattaatcggtacatcattatcccaaatgacacgtggatgctcacgatcccaatcaattctaattgtttcatttacttcaatatcttgacatgcttctacacaacggccacataagatacattgatttggatcatagcgataaaatgggccataatctttttcgtatggcttctctttatattcatacgtttgatgctgaagtccccacgcatccattgtgttatgaatttcacaatcaccattattataatcacacactgtacaatacaacatatgcttttctaaaatgcggtcaagcgcttctttttgagcatctttcacatcattgttcacagtatttacagtcattggacgatcaatcaccgtactacatgaacgttcaattttaccgtcaatttcaacagtacatgtatcacatgtttgaattggtcccatcgactcgttataacaaattgaaggcacaaaagtatcttgcgatttaataaattcaagtaaattcgtaccaggttctacaagataatcttttccatcaagtgtaaccaccaaatgttcttgcatattactcaccccgtctatatattttttccgtaaatgacttttaataaattgctcatatccacctaaaataacgatgccccacacatctttcagatagaatcaatataattgtattactttaagtgtataatgttaagcgtattttcgtattttttatttttgcaatcatttttatttgaaatattttgcgcgaaattaaatcatctttttgtttaattgaaaataattatcattattagctttccaattatctgtttcacgcttttttgccatatctttcacaaccttattaatgacaatacttaatattcacctcacctaaaaatcgctatactatttataaataccctttttctgaaaattaataacccaagtctgataaaaatctactgtcatttagaaggtaagatttatcttaaaattgaatttataatgggttaatttacaaaaccgcaaatcaggcattaaataaaataacccataaatacaaagtgttatcaccttctatttacgggctattaattctattcgttattctttttacagcttattctatctaattaatttgtgtacaattttgataacttattttcccttagtttactactctagattatcttttaataacttagtactttcagcttttgactgctcactaggaatgaagtagtacaatccgtcactttgaatgccgccttgaccactcaattgatgtttattaattgtgtcattagcatctttataattgcttctaatcgtattcaaatcacctaatgttaaatctgttttaacattattttgaatttcattcattagactattaaaatgtgtaatcgatgatgggcttgcaatcttattagccatcgcttcaagtacaatttgctgacgttgttgtcgaccaaagtcaccaccagcaccttcttctttacgacttctaataaacttcaatgcttgatcaccatttacatgtgtttgctgtccttttgtaaaacgaacaccatcaacagtgaatgtatcattacttactacatcaacaccgccgatgctatctatcatattatgcaaaccatccatatcgattgtcgcataatgatcaattggcacattcatcaatttttcaagtgatttaacagccatatttggtccaccatatgcataggcatgtgcaattttttcagtagtaccacggccaacaatttccgctcttgtatcacgcggtatacttactatttcagttttcttcgttttagggttgatagataaaatcataatactatcactacgctctccgccaccctttttcttacgatcagcatctgaatcgacaccaaataaagcgattgtgaatggatcaccatcgtttaaactcacttttttatctcttaattctgaatgattacgatctaaaggattgtgtatcttattaccagtaataaaaattttagcagctacatacacaacagctacaatcgctaagattactaaaataccgaatacccataaaaatatttttttcggtaggctcattttacttttagacgaacgtttcaatcccaccactcctttactattccttacatactttgtctgttttctctatttattatatagtaaaataatttttttactatacttctgtagacgtataactattttttatcattttttatcactagagaatatctatctgtatttttgataaccaccatttgcatttaaaattttaagtaccgtttcatgacatgctttattacttataataaaaggtgcaccctttaaatgatcaattgccttaccatctaaagttgtcatttttagattcaatagttctgcaaataaaaactgtgcagcaatgtcccaaggtttaggatttgtattaatatgtgccccaaattgaccttttgccactcgcatagaatctaatccgcaagcaccaactaaacgataactaaatgaggcgtcaaataaatcttgcaccgtatccagattcatcacttgtgcattaaacgatataatagcgtcttccaattttaacaatggtggttctttcatcttaattccattacaaaaagcaccttctcctcgtattgctttataaagctttttatgcggataatcatatacgtacgataacattggtttaccttcataaaaatacgccaatataatacaataatcttcttgctgttttactaaattggcagttccatcaatgggatccataatccataaatgattaatttcattcgtaatcatttcattacttttttcttccgctaatagttggtgttccggaaaatgtgttgctaaaaattgttgaaattgttgttgaatctgtttatcaacatttgtaactaaatcaaatcgatgacgcttggtttctgtagtcatcttcataattaattgtggaataacattgtctatttgtttcaaccatgaacatattaacttatctatttgctgtaatgttttatctgtcatttcgtccaccacttctcatatcattatcattttattattaccctatattaaaagaatcaacaatacaactgaagacttcttcattttatgcataaaaaaatcggctagtcacgtgctagccgacaaatagaaaggaaagtaagtaataaatattgaagatgttgtgatgtaacttgaacgattaaaagctatctgttatatagctctacccctttgtttaatcgctccccctgttacaagtaatatcatagcacaatcttttttaaaatgtaagcgttttccaccaaaatttttccggtttttttaaaaagatattgaaaatgtcctcattgtcactcttatgttatactttgtgtaatatatcatcttttaggaggtggctgtcatgaataaaggtgaaaggcaaaatttaataattactgcaattcaacaaaataaaaaaatgaccgctttagaattagctaaatattgcaacgtatccaaacgcacaattttaagagatattgatgatttagaaaatcaaggtgttaaaatttatgcgcattatgggaaaaatggtggttaccaaatacaacaagcacaatctaaaattgcattaaacttatctgaaacacaattatcggccttatttttagtgcttaatgaaagtcagtcgtactcgacattaccatataaaagcgaaatcaacgcaattataaaacaatgtttaagtcttccacaaacacgcttaagaaagttgcttaagcgcatggacttttatattaaatttgatgacacacaacatatgacactcccaatgttgttttccgacattttaatttattgtacagaacgaaatgtgatgttagtagatcatagggttgatgataatattaaagccgaaaacgttatatttattggccttttgtgtaaacatggacattggcatgcagtcatttatgacattgctcaagacaaaactgccgaactcgaaattgaaaatattatagatatttcgtattcattcggtaagacgattcaaaccagagacatatccattgataactatcatcaatttttaaaccccatcgattcctaaaaaacagcagtaagatgattttcaattagaaaatatcttgctgctgttctctatttatacaatacttcgtattgaatggcttcgctttgcccgtctggcacattacagtaaaattctataaatagaatttttgatgacgggtcccttcctagggtgccgtctcagccaccccaaccggcacattgttgtaagctgactatatgtcagcttctatgttggggcccctgtcttcgactggcactactccctcaggagtctcgccattaatactacgtattaacatgtaattttactttgaaatacttaaaaaaataaaacactttgcccaacttacactaccaatagaaactgctgttagaattcctcaaaatgatatttcgcgatatgttaatgaaattgttaaaaagatggctgatagcgaattcgatgaattcagacatcatcgtggcgcaacatcctatcatctaaaaatgatgttaaaaatcaactcatattcatatactcaatctgaattttctggccgtagaatagaaaaattacttcataacagtattcgaatgatgtggttagctcaagatcaaacaccttcttataaactattaatctttttagagtgaatcctaatactgatgcgctaattgaatctttatttattcagtttcataataaaatgcatatcaaaaaagctgatttctatcaaataattaatagaaatcagctttttttcattgcctaaaaacttaatatcccgacctctttatctacgcataaatacttattactgatataacgaaagaaacaaaattatttgctatatgtaatgcaattgttgaacctaggtttcttccagattttaaataagtgaaaactaatatgatggatagtatgagatatggaccaaactcaaacggcgactttgcatcagtcacatgaataaatgcaaataagaacaccgaaacaatactcatagctataaaattaaacttcttacctaattctccaattaaaatatgtctaaatacgatttcttcaactattggacctacaatcacaattaataagaatgctacaggtaaaaatgcaggcacttcaaacattttatttagctcaagttcattggctgtttcactatattgcaaatgtttaggtagaaactgtgtcatatattcatatgtataaattaagatgagagcaataatatacgttattgacaatctaagccaatattttttgatatacgcaaaaccagctcgaagccttgatggcatcacttttaaatgaaataaataaaatgcgccaatcccaatcgtatatgctaaagcttgtgtgatagtcgatacaaatatcagattactatcgatttcataataattgaacaaaattggtcctatgtaagctgcaattgtgagtgcaaatgataatacacctataattggaattataagcaaatctctccatgctatatctttaaacgtgtatttctttttttcattttccactgttatatcctttcctgtttaataattgatatttggaggtacttctacatgataaacgaaactaagtatatgagacaacaaattactaatttgattcaaatcattgatacgattaaatataatactttaatgacagattggaacattcaaacgcatatttataaatttaaccaaatagttactaatgaattgaataagttcaaaggctttgaaacatcatatataataaacgaaaatcaagttttctattatgaaattataacactacttaataaacgtcccctccgacaagtcgactatggtaacaaaattcaatatcttaatttttatcatacagaactatctaacgcattatttgcaattaaatttgcccattaacctatttttcataaaatgtcatttaaacaagttatttattaaaattcactttattacataaattatacaattaaaaagtttcttcaaattgtaaagatgcattaatcgagttataatcataatgattaagatggtagatttagtcttatataactacatttactaagatttaaatagatgagtacataatgtataaattgggaatatacagtatgacttacggtaatatatcaatatattgatatattatttgcacatgggagtatgctattttttatctatacatcttaaaaaaatttacagttttataattcaatatcattaaacaaacaacatattcagcttatttttcattctcttacgttacaagttgtaaataccatcgcgttaaacaacaatagccaacgctaataaaatatattgcgttaaagtggagtgattaatatgtcaaacgtactaacagaaatagatagtcaatatccatatatgactaaaaatgaaaaaaagatagctaaatttatactaaattcacctcaaaaggtgattaaaatgaggtctcaagacttagcaagcttattagatattagtacatcatcagtcattcgattcagcaagaaaattactgatggcggttttcacgacttgaaaataaatatatctaagtatgttcctaaagcatcatcaatttacaatgttgaattaatgaataacgaaagcacagaatctttaagaactaaactccatacacgtactacacgcgcacttaatcatgcaaataacgaattaaatgataaaactattgatcaaatatgtcattgtttaaaacgttctgagacgatttttatatatggttttggcgcatcttttgtagttgctaccgacttataccaaaagttatcaagaataggtcttaatattcaacttgttcaagaaacacatatttttgcaacattattagcaactcacaattcgaacgacagtgttattcttattactaacaatggtacgcaaagtgaaatgcaatcaatggttaaagttattgatgactaccatatacctataattacaattactagtacaagggataatcccgtagcacaggcatcaaatattgttttaacttatgggaaaactgatgaaaatgagatgcatatgggagcaacaacttcattatttgctcaaatgttcactattgatatattatattatcgttatgttgcattaaattatcacgcatcattagatttcataacacaatctaaaatggctttagataactatcgtaaacatttatcaaatattaactttaaacattaacagtcttatataaattctttaatcatgtcatataataatttatgcatcattttcaaagcttacatgtcttttatcttgtataacatacgcatatgaccaatgatttgataaggccattctatttcttatattaaaaacaaacgcagttgattaacggatttattccatatatcaattgcgtttgttattttaataatgctattttttattttaaagcccacagtaaaaactatcgatagtattgccacttataagtttttcatactacatctttgatttaagctaaatttataaaaaaatgcgcctactcataacacttctttggctatttaactttaataagctagggccaagtttgtcataaaataagcgcacattataatcatactattttgcttttacattatttttattatatctaataaaataataaatcgttacaatcgttaagaagatgacaccaataagcactgatattctagtttcaacattaaataccataccaaccaatactaatattaagaataagattgttaaatagttacttactgcgccaccaggcattttgaatgggtgaccttccacttcttcagggtgtaattttctaaaacgtaagtgactgaataaaatcataaaccaaggaatcatacctggtaaaatagacgcactatatacgtatacgaaaatactcttcgctccatcgatatataaaggtaaaattacatttaataaagcaccaattaaaataccaagagatactgcaacaacagtgtacaatggcacaccatttctcatgattttagtaaatattttcggcatttcacctttatgagcaagtgtataaatcatacgactcgcactgaaaatacctgagttacatccagacattgctgcagttaatacgacaaagttaattaatccagctgcaaatgtaataccgattttagcgaatgttgcaacaaacggacttccaatgtctcctaattgattccaaggatacactgaaacaataacaaaaatagcacctaaatagaaaattaaaattctccaaataacaccattcactgctttaacaatatttttctgaggatctttagtttcacctgcagtaatacctatcagttccacaccttggtatgaaccaattacaattgataatgcaaagaagaaaccaacaataccatttggcataaatccgccatttgtccataaattagaaatacctaccgcatggccaccatttccaaaaccaaagaaaataagaccaaaaccagcaataatcattaaaataattgttacaactttaattaaagcaaaccaaaattcaaattctccaaacgcttttaccgagaataaattcgctgccattaataataaaatagcaataataccaggaatccaagttggcaattccgggaaccaaaacttcatatattctcctactgcgatgacctcactcataccaacaacaatccattggaatatattactccatgctgtcatataacctgctgcaggatgtatataatcacttgcaaatgttgcaaatgatcctgttgtagggtttaaataaatcatttcccccattgctctcatgattaaaaataaaaagatacccgcaattaaatatgcaaggataactgatgggcctgtccatttaattgtacttgtggcacccatgaaaagccccacgccaatcgtaccaccaagtgcaatcatttgaatttgacgggcactcaatcccctttgtagttcattgttctccataacttcttaccccatctctgattgatactaaataaatccataaaaaaacttattgccgtaattatactataaattaccgattttggtacattaatatttgcataccatgcaatcgtttacagaactactatagcaggcttttgcaactttgcaaacaattattttgtgatttttctaaaaaattaaaaaagttgtccgtgaactgttgcgtcacatacaacttcagctattctcggtaattatgatataattttaataatattaaaaaggagtatatcaatgttaaaacaaatactgccacgtgctacaaaaatatcggtaatctttgctgtagcatttttcatcataaattatatcggtatggaaaaacctgacatcctatatttagttggaagaactattattgcaacacttgctttcatactcatttgtcttacagtatttactattattaattctccagagcgcaagattaaactcggtacgactttaccgattgcattaattattggtatcattttcggcgccatatttttaacggtacaaatcggtgtcatcactgggttaatcatcggtgtgattgctacgtttatttgggaattgattgaaaaaaataaaggaggtcgttcatcatgacaacagcattaattggtgtaattgtattaatcttactaattattagcgttgtgccaaactaccgtgctatgaaatcagcaaaagaacaaggaagtaatgcaacaagagctacaattatggtaggcatagatattatcttaattgtacttatcatcgtgacgttattattaaaatatatgtaactatttaaaccaccctatctcatacataaacatgaacgttctaccattttacatacatatggtcgtccatttaatgaggtaaggtggttttctcgttaaagtttaccttgtaatagtaaaaaatagccaattgttgcaagtattaagtaaatcattgaaccaacaacaaaagatcttacttgcacgtgaaatggtgtctgtttgttaaatataggaccaatcaccaaatttccaacgcctaaaattactggaccagctagaaaaaacaatataatgtaacccatcatgatacgcctcctatttcgtaaagaaacgcgctacaatttgatcgtaatcaatatcttttgctacataatctacattagaaaagtcctgtgcgcttgtcattttattcgtattaacaataacatctaatccagctgcaatcgcggctgttgcaccatttacagaatcttctatagccaaacattgtgtcggcatataatttaattgttgtactgcagataaatataattcagggtcaggtttaacttgttcaacatcttctctaccgataactacctctatataatcgtctagacctaatgctttaaaggtaggcattatttccgatttaacactacttgtggcaatcgccataggaatgtgacgttgctttaaaaatgccatcaatgatttaatcgtatcaatcatcggtaatgtcgtactagtaagatgatgttcttcataaagtttatctttattttccgaaccaatcgctttaattaaatggtcatgcaaatctgtagctgctcccccaatagaagaacgataaaaatcaatgcttataggatcggcattatgcatctctaaatgtttattaataacattaaataaatgttgttccgtatctattattgttccatcgaaatcaaatataactgctctatacatatatttactcctctattttttctctttatcaaagcttaacacagtccgatgaccacttcattctattagtgcaattataacttttttgaccaatactttgctaaaataggccctgttatattatgaatgaaactaaacactgcgcctggtactgctgcaattggattaaaatgcaatgctgctaatgacacagctaaaccagagttctgcattccaacttcaatactgactgctttttgatcttgtcgatctaattttaaaagacgagctaaccaatatccaatcgtataccctaatacgttatgtaacataactactaaaaatattaataatcctgtagttaagatttggtgcttactgccacctacaactattgctaaaattaatgaaatagcaacaactgatataatcggcaaagctgtagaagctttttcagcaattttacgattaataatttgcaaaacaatacctaaagcaattggaattaatacaacttgaacaactgaccacaacatactcaggaaagatacttccaaccattcatttgcaaatagatatattaacgcaggtgtaacgaacggcgctagcaacgtagagaccgtcgtaatagaaacagaaagtgctacgttagctttgactaaataactcattacattacttgatgtcccacccggacaacatccaactaatattacgccaacagcaatatcaggtggtaaatgaaaagactttgcaattataaatgctaatgtgggcataatactgaattgtagacagacaccaataattactgctctaggtgctttaaaggccattttgaaatcattaggtgtaattgttaatcccatacctaacataacaataccaagtaaataaggtacccacttacctaatgtcgcaacatgttgtgggaaaataaatccaataacagctgctactaacatccataccaaaaaactcttcgtggcaaatatactcaattattgaaacattgttaacacatcctcgtcgataatattgaaaaatattaccataagaccagtaaggttacaattacttttctgaaaattaagattatttagctatttttttcttattgcaaatattttatcactgataagcaattattttaaacttcattcaaaagtcttagtgaataaagaaaaaaagcgtggtaaaatcaacttgaacaaaattaagtcacctttataaatattaaacgtgtatttaatgccatgtattcctcgggaggtcctcacatgttaattgataaattcgaaacatacatcatcaacatcgccggtttaaatgaccgtactactagaaaaaaattaagtaagttatgcaaaagtgtacaattttgtgatgcgttgcaattctcaataaacaaacagtttaatcagtatatattagaaattagcttaccaaagcaacaacttccatacttcatttcatttttaagttttcatcagtatagtattttccaagtactttcaccaaagaaaataaatgaattacttgattctgataatttatatcaatctgcaaagcgtttcgatatcaatattgatggcttgcaagatgctttcattaaagacaaagtcatcgatattatgaacatgttccaaaatcacactgatatcacttatacgttgaataagtctcatgcgcatattatatgtacgccagaaatattcgctaaattgttacatacgattgcaactagaaatatcgacattctatctgccaattatagatcgtcatctatgagcaaagctcgtatatcataataaaagacacatctatacgatgatcatttacaatgattgcgtatagtgatgtgtctttttttgtattatttatcttcggacgattgatcctcaaccatttgttcaaatgcttcacgaacttgtggtactgtcatacctactacaacttggatactcttaccactctttactaatccgtgtgccatttgttgatgcgtgaaatattccgtatccgcaactttattttcatcataaacagttaagcgtaatcttgttgtacagttagtaacatctttgatattttctttgccgcctaaaccgtctaggtaatacgcagctttgtcttcgtattcattaccagttgaagcacgttttgaatccgtatcttcgccttttttatttttataatcttgtttagagaataacttaacttcctcttctgttttcttacgtccaggtaatggaatatcaaatttcaaaattaagaatctgaataagaagaagtaaatcgctacaaatattaagcctataacaacttgtgctacataagtgccccaatgttctttcccaagtggtaaccagtttgttgaaataaagtctaacaagccaccccccatgttacctacaacaccaaatgcgtacattaaagtatccattgatgctgctaaaactgcatgtaaaacaaataagtatggcgcgatgaataagaatgtaaattctaatggctcagtaatacctacaactactgctgttaatgtggcaggaataagtagtgccgccacctttttacgattttctttaggtgtcgtagcatacattgctaaggcaatacctaaacatccaaatactttcccatttccttgaagcatgaagccataagggaattgctcttttaatggcttactgctcttagcaaactcatttaagtgttgtaaccattcagctttcaagccgtgattaactaccactggaccaacttcaattggtgcataaataaagtgatgtaatcctgttggtattaatacacgttctaagaagtgatacaaccatacaccgatatagcctgaagcaatgataaagtgttgcattgagccaataccgtgctgaacagttggccaaataacacaagtaattgctgctaatggtaacatcacaaaaaatgaaatcgtaacaacaaatgttaaaccttggaatacaccaaccatttctggtaatcgtttactatagtatctattgtgaatccaagtaataatagctgaaataataataccacctagaatattcgtatccaatgtggcaatacctgcaattgattttaaaccaggtacattttcaacgcctttttctaaattagcgccaaacgtatgtggccattgcgttaaaatggcatttataaatgtattaaacattaagtaacccatcaatgctgcaagtgctgcatgacctggtgcttttttagctaaagaaagtggtaaacctacaacaaatacaacttccatatgcgtaaaaataacccagccaccagattctatcactgaccaaaatttaaaccaaaacgtatgttgatctgctaaactccccatgattgtaggatttttaaataatgtcgcaaagccaagcactatcccaaagaaagcgaacattaatactggtacaatcattgcactaccgaaacgctttatcgcattcatcttctattccctccatatcatctttcctaacaatacatctaattagattcatttataaatagatgccttactatttaaatataatatatagtaaacgcttacacacctacaacgacattgacgtattttgaaagtattttgtataatcagattatcttttcatatagtgaaaaaattttcacgaccttatatatgacatcgttgtatttgtaatacattcgttttaaacgcataatcaaacctatatcaatacacaaatatacataatgacatacaaggttttaatgtaataacgatctatcacaaatttattttccaaggaggttgaatatgtttttagacgaacacattaatagaaactttgacaaactgaatgataatgatttacatatcgctcactttatcaatacacatatagatgaatgtaaaaatatgaaaatacaagatttagcgcaattcacacatgcctcgaatgcaaccattcacagatttacacgcaaattaggttttgacggttatagtgattttaaatcgtaccttaaatttgaaagtaataagacacaccaattaccatctaactctatcgatagtttcaaacaagaaatcgatagtacattcagttatttagaacgcgttgattaccagcttcttactgaaaaaatgcatacagcttcaacaatatatttgtatggtaccgggcgtgcacagttaaacgttgcttcagaggcacagcgtatattgttaacattacataatcatgtcattgtacttcatgatgaacatgaacttaaaatgattttgaataagagtgaacctaatgatttattctttattatttcattatcaggtgaaacacatgaattattagaagtaacaaacttgcttcaacttagacaaaaatactttatttctgttactacaatgaaagataatacccttgctcaaaaagcaaattacaacgtctatgtatccagtaacacattctacttaactgatggtacagactattctagcttcatcagttatcatatattctttgaaacacttgtaagaaaatataatgagtatttactacatcatgatatttcaaattagaaaaaaggaagttatgatttaatggccttgagcctatcataacttccttttatcattttattgttgtgttgatgtttcgataacgtggtacatcttatcaaacatcaattcgaaaccatgcaccatggcatcatgatattcttttttcttttgcttgtattctaaattagtaaatcgtctttctttttcaactaatgaacgataataaaatagcatttgggtgccacctgtttcacgttcaaaaaattctacctcaatgacatcttgtgtttcacttagtccaggcataccgatagtcatcttaacgtattcatccataactaaagattcataaataccttcaatcacatttactttgccattacgttgttgatctacaatacgatatttaccgccttctttaacatccgcttcaatctctttattcgttctggctgatgtcataaaccattgtttcaacaaatctttctttgtccaagcttcgtatactaactctggagaaaatttataaagcttttcaatttcaacttcgacatgttcattctctacattaaattttgccactgttgtccacccactttcgctcttacttttattttaacgtatttttgctcagttccaaacatagatgatcatcatttttaaaagattagcgttatacggtgagtacaacatgatctgttaatataacaagccaccttacttggctacatcgatatattgttaagcattaatgtttcatttcttgactagtgttctttttttagctttggaaaattaaataaaatcgcaataagtccgcatacacctaataatataggataaatgctgtatgggaataacattaacggtgaaataccagctacaccagccgctgaaatgacttgcgggctatatggtaataaaccttggaagcagcctccaaatatatcaagaatacttgctgatttccttgaatctacatcatattcatctgcaatatttttagctaaaggacctgacataataatagagatggtgttgtttgccgtggcaatatctgcgacacttaccaaactcgcaattcctaattctgcgccacgctttgatttcactttagagcgaacaaattgcaacaaccattcaataccaccattgtgttgaataataccgactaaaccaccaattagcaacgcaatcatagcaatatcttccatgcttataatacctttggacactgcatctagtagccccatccaaccgaatgaaccatctatgagaccaatgattccggctaataatgttccgccaatcaatacgataatgacatttacacctaataatgctaataccaatactaaaatatacggtacaactttaattagattataatcatagtttttagcatgatttaaagaaatgccattcgttaagaaatacagaataataatcgttaaaatagcacctggcaatacaattttaaagtttactctgaatttatctttcattttcgtatgttgtgttctaaccgcagcaattgttgtatctgaaatcattgatagattatcgccgaacattgcacctccaacaactgtagccattgctagcgcagttggtacatctgtcgcttgtgcaaacccgtaaccaacaggtgctattgcagcaacagtccctactgacgttcccatagatatagaaacaaacatacaaatcacaaacaatcctacaataattaaattttctgggattaatgatagtcctaaattaactgtcgactttacgccacccattttttcagctgtatttgaaaatgcacctgctaaaataaaaatcaacatcattaaaataatgtttgaatggcctgcacctttcgtgaagacctcaacttttttagcaaatgattcttttcgattcattaataacgccactattaccgttatcgtaattgcaacatttaatggcattgaagtaaaatcacctgtgataatacctacgcctaaaaacaacgccacaaataataacaaggggaataatgcccaagcattgctctttttatgtacttccatcctttttacctgctttccaattaaaaatacctctttctcacaaacgatgaagaaagaggttttcatgtgctttacctgcttatcttcaaaccattacggttactggaattggcacattcgagatgttgccgaggcttcatagggccagtccctccacctctctagataagtgatgcttatttacgtttacgttacaagataatccttagtacgtcaatcataaattaatcaggagtcgtataatatttttgataaacaatcattgctactgtaataataatcaaaacaataatgctaataacaagtaaaagccaccatttaagcattaatgcaataaaaatgaacacgatagatacacttactaatattaatgatatgactttaaattgctgtgcgctttgttcagaaataactttcagctgtttgtttgatggatgcgtatttcttatactgattcccagtatattttctaatatttgaaccaatacgatagttattgcaaatataataattggtaaaacatcatagctccctatagttaatgtataaattacaaatccaatgtaaagtaaccctgagacaaaggctaaaaagtatgcgacgtatttgttaaacttaatgatatgctttttaatattttgatgggtaaaccatacattcataataatcgcaactgctacaaataatgtgaatactatatataatggtaatttttgttcaggaaaaacagtcgctattccaaaagctaatgctaaaatcaaaaataatatagctctagatactattaatgccataataacaacccctttgtttaatatcgagtttgcaaatttacgtttatcagcatttctatgatcagtacttctaagggcagcgtttctatgtaatttacatcatcttaacatataaatacttcgctatataattaaaaacatatcctattattctttgtccgttctgacgtctaatatctaaccttaggcatttcacttgttaatgaatttaactttcttccactaaccgtccctaaacccaatcccgcaatagattttaactttttcgttgttgtcctgacatcctcattaagaaagtttattctgcttaaaacttataatccacaccctgagcaaacgctccttatgacagagtattaaaataagccgataaagatacacacctttaccgactatttaaaatacacttcaccaattcattttaatttacttgattgaagtagctaaattaatattatgttgttcaattaaaagcttcatacaaacctaatctatttgcactccaccgctaacaccgaacacttgtccagttgtataacttgattcttctgacgctaatagcacataagttccacataactcaacaggttgacctgcacgacctaaaggtgttttttgaccaaatgttggaattttactttgaggttgtccaccagaaatttgtaatggtgaccagaatggaccaggcgctacacagttcactctaattccttttggtcctaattcttctgaaaaacttttagttagtgaaataattgctgcttttgaagcggcataatcatgaagaataggactaggattataaccttgtacagatgatgtcgtcgtaattgacgcacccggttttaaatattccaatgctttttgaactgtccaaaatagcggatagacattcgtttcaaatgtttctgtaaatgcctcagttgtaaatccatgaatatcatcatgatactgttgatgtccagcaactaaagtaacattatctaagccacctaattgttgatatgcttgttcaacaaggtcatagttgaactgctcatctcttatatcaccaggaattagcactgccttttgaccactttcttcaatcacttggcgtacttcttgtgcatcttgttcttcactcggaagatagttaatcgctacatctgcaccttctttagcatacgcaatcgctgctgcacgccctattgctgagtcaccacctgtaactaacattttatagccttgtaagcgttgatgaccttggtaagacgtttcgccacaatcaggtgctggcgtcatttcagattgtaaacccggtacctcttgttcttgtttttcataatccgttgttttaaattttgttctaggatcttgagctgccattttttaacatctccttattcgcttaatggttattatttacccaatcttcctaggaacttaatcatgattacactaaaaattacttttttctttataaaaacaagctcgaattactcatgcaatagtctctttacaaattcaacaaaatactcaggtactttttccataatcctttcatccggtttatattgaggatgatgtaaatcatattcactatgagaaccaattaacgcaaatacacttggaaaatgttgactataacctgaaaaatcttctccaatcgtaagcggctgttccatcatttccaccttatatccaacatgttgggctactgaaattgctttatgcgtcaatgcctcatcattcatcacagcgccaggtaaatgtgtataatttaaattaattttcatattatatgcttgagctaacccgtccgcaatatcttgtaatcgtgtttctacaagctttcgcaccacaggatcaaaactacgcactgtgccttgtacatacgcatgatcagcaatgacattccaagtattaccacatgatatttgtcctattgttactaccgcttcatcaaacgcagatagatttctactaactatggattgaatactattaatcaattgcgccaacacaataactggatcgttgcattgttctggctttgcagcatgaccacccacgcctttaatatgaaactcaaaacgatctactgctgatgtaattgcctctgttttgattgcaaatgtacctaccgaacgcgatgggtcattatgaaaacccaatactgcttgtacatcttgtaatgcatgtgtttcaataattttaaaagcgccatgtcctagttcttctgctggttgaaaaatgaatttaacacgcccagtaagagtgccctcaatttcttttaactttacagctgtagccaaaatactagccatgtgaatatcatgaccacacgcatgcatcacaccttcattttcagatttaaaatcctgttcaacaagctcttgaattggtaaagcatcaatgtcagcccgaacagctatacaactcagaccttgccccacttcagcaacaagcccagtcgcaagtggtaagtctaatattctaatattatattctgttaaaatatctttaattttttgtgtagtcttaaattctttatcggatagttctggaaattgatgaaaataccttctccaggcaacagcttgatcttttaatcccatcggtcattccccttccttaagtcaatgatatgttgtctaccctacgatgatcgtctttaactattaaacgatgatttcacaacaatgtactcttgttaattactttcgctaatgatagacaattgtttaataatatcgtaacactattgtcaaactattctaacttttataattaagaatctatataaaaacgtgttctcggataaagttgttttcacaaatcacaaaaagctctaaacattagtgtaaatcaatgcttagagctttctaattattttatgctttaaaagataatgtgttatctacgatgaccttaccgtctttaataactttttctgcgtgattgataccaaaatgatatggaatatattcatgatttggtgcatcccaaattactaaattagccttatcacctgtgttaattgtacccgcgttaatgtctattgctttagcagcattgaccgtaacagcattccaaacttcattaggtgatagctttaatttcaaggctgcaatcgccataacaagttgtaagttgtttgtgacactactaccagggttataatcagttgctaatgcaatcgcaccgttattgtcaagcatgcctcttgcatctgcataatcttctttacctaaatagaacgtcgttgcaggtaagaggacagctacagtatcactatttcgcaacttttcttttcctttatcacttgaagctactaagtggtctgctgatattgcttgttcatcaattgctaattccagtccgcctaacggatcaatttcatccgcatgtattttcactttaaaacctgcttcttttgctttttgcatataatgttgcgattgttctattgtaaatacacctgtttcacagaaaatatccgcaaagtctgcatattgttttacttccggaagtaacgcaatcatttcttctaaaaatgtctcatttgaacttgcctctttaggtacagcatgaggccctaggaaagtatgtttcatgtctaaatcatatttctcagctaaacgattagacactttcaattgcttcagttcattttctctatctaatccataaccactcttactttcaactgcaagcacgccgtgtttaatcatagtaagcaaatcatgctctgcttttttaaacaagtcatcttcggatgtttctctagtagcattaacggtagataatatgccaccacccatttctaatatttcaaggtaagacttaccttgacgttttaatgacatctcatgttctcgagatccaccaaatgttaaatgtgtatgtgcatctactaatgctggggacactaccttcccactagcatcaatcgtctcagtcgcatcgtagtcatctgtatgtgttccagcatatacaattttgccatctttaatgacaactgttccatttttcacaacatttaattcatctaattccttacccttcaaaggtttatctgttgatctcggtaaaattaattctgctatatgattaattattaaatcattcattacttatcacctgctttatcaatcattggaatatgaatacctttttctttagctgtttgaatagcgatgtcatagccagcatcaacatgtcgggcaacacccatacctggatcagtcgtcaatacgcgttccaatcttctttcagcacgctctgatccatctgctacaaccaccatacccgcatgaagtgaatatcccatgccaacaccgccaccgtgatggaatgaaatccatgaaccacctgcagctgtgttaattagtgcattcaatacagcccaatcaccaaccgcgtcactaccatctttcatactttctgtttcacggttaggactagcaactgaaccagcatctaaatggtctcgtccaatcacaattggcgctgaaatttcaccatcgcgtacaagacgatttaaagctaagcccattttcgctctttctccatagcctaaccaagcaatacgtgatggtagtccttgatatgagattttttcttcagctaaatcaagccatcttaataacttttcattttccgggaaaagtttgcgcatttcttcatccgcacgctcgatatcttttggatcaccactcaacgcagcaaagcggaatggccctttaccttcacagaataatggtctaatgtaagctggtacaaagcctgggaagtcaaaagcatttttcactccgttattgaaggctacttgacgaatattgttaccataatcaaatgctacagcgccacgtttttggaattcaagcattaattcaacatgctttgccattgaagcttgtgagagttcaacatattttttcggatctttttcacgtaatactttcgcttcttctacagagtatccttgtggcacatatccatttagcgggtcatgtgcacttgtttggtcagtaataatatcaatttcaaaccctttttctagaatcgcttgatggatgtctacagcatttccaactaacccgattgacaatccttctccacgttctttcgcctcttctgctaattttaatgcttcatctaaatcagctgttttaacatcacagtatttcgtatcaattcgcttatcaacacgtgtttcatcaacatccacgcaaattgctaccccatgattcatagtaattgctaacggttgcgcaccacccataccacctaaacctgctgttagtgtaacagtgcctgctaaatctccattaaagtgttgattacctagctcggcaaatgtctcataagtaccttgcacaataccttgagaaccaatataaatccaactaccggctgtcatctgcccatacatgattaaaccttttttatctaattcattaaaatgatcccagtttgcccattcaggcactaatactgaatttgaaattaatacacgtggcgcttcttcatgtgttttaaatacagcaactggctttcctgattgtactaacattgtctcatctgattctaattctcgtaacgttttctctattgcttcaaaagcttcccaattacgagctgcttttccaataccaccataaacaactaaatcttctggtctttcagcaacttctgggtctaaattgttgtataacattctaagtactgcttcttgttcccaacctttacactcaatactcaaacctttttttgcttgaatttttctcataaaattcgctcctgttctttttagaagttaattccactgaatttaaaacgcttacatcattatcttcaatattcattatagtatgttaaaatatagccaacaaatataaataaactaattatccatagcttgaatctataaataaaaggagcaaaatacatgaaaattattcagttagaatacttcttggctatcgtgaaatataatagttttactaaagctgcacaatttttacatattagccagccatctttaactgctacgattaaaaaaatggaagcagatttaggttatgacttatttacacgttcaacaaaagacatcaagattaccgaaaaaggaatacagttttatcgttatgcgagcgaattagttcaacaatatcgatccacgatggaaaaaatgtatgatttaagcgttacatcagaaccaaggataaaaattgggactcttgaatctacgaatcaatggattgcgaatttaattcgaaagcaccattccgactaccctgaacagcaatatcgtttatatgaaatacatgacaaacaccaatctatagagcaattactgaattttaatattcatttagctataacaaatgaaaaaataacccacgaagatataagatccattcctttatatgaggaatcttacattttattagcacccaaagaaacatttaaaaatcaaaattgggtagatgttgaaaatttgccactcatattgccaaacaaaaattctcaagtgcgcaaacacttagatgactattttaatagaagaaatattcgtccaaatgtcgttgtagaaacagatcgattcgaatcagcagttggatttgttcatcttggcttaggttacgctatcattccgagattttattaccaatcatttcacacgtccaatttagaatataaaaaaattcgtccaaacttaggccgaaaaatttatatcaattatcataaaaagcgtaaacactccgaacaagtacatacattcgtacaacaatgccaagattatttatatggacttttagaggctctttaacttaagttattagagcctcttatgcagttgcgcagtcaactgtataataatttcataaccaattttatgatttccatgtataaatcattaaattcagaccagcaaacataaataagcagtaagatgactacaacttaagagtcttcttactgcaattatctttcaaatatatcaacgttaatataacttctattacgaaatactcacattctgcccttcaatgcaaatttcgtcacatataaatatttttaattattttaaaaaatgatgcactaaattagcaacaagctttgcagttctattgtcagcgtcatatgttggattcatctcagcaatactaactgaagacaccttatcacttggaataatacgttttgccaattcaagaacagtatgtggatacaaacctaacactgccggcgcacttaccccaggcgcaaacgcactatcaatgacatccatacaaatcgtaaacataatgacatcatgttcatgtacaaaacgttcaatcatatctttaattgttggtgatacgtgactcaataattcatctgcaaagacataatcaatctttttctctttagcataatcaaataaactttgcgtattacccccttgcgaaataccaagcactagataatctgtattatcatcttcttctaaaatttgtctaaagctcgttccagatgtagattgttgttcagcacgtgtatcaaaatgcgcatcaatatttatcacaccaatagattgtgttggatagactttacgtgttgctaaatattgagcatacgcaatatcatgtccaccacctaataaaaacgtttgtctatgattaacaattgacttcgctgcaagtgttgcaaattctttttgagtatcaattaattcctcatgatcatgataaacatttccgtaatcgactaaagtttcacattgattcaaatccggcaaacctgcaaatgcttgtttaatcgcatctggtccttcttttgcaccaatgcgccccttgtttaaagcaacacctttgtcaacagcatagcctaatataccaacccctgatggtgtactacttttttccaatttcgacaaatcttcaaatgtcactgtttgaaaatgcctgaattttttcgggtctgtttcactatctaaccttccagtccataaatttggttcaccttgcttgtacacagcatttccccctcttatttatgtggctttttaacaattaaagtataacgtactacaaattttgaattcaattcataattaaaaagtacttatctatataccttttacccctattttctattcactaacgaacacgaaagcgatttatgttaataaaatacgtcaagactattacattttcattaatattagcacagacaatttaactcacggcttgtaatatgtataattgttacaaaatgatattttgcttgttacctaatggaggttacatataatgaaaaacaataaaatttctggttttcaatgggcaatgacgatcttcgtctttttcgttattacaatggcgttatccattatgcttagagatttccagtctgtcattggtgtcaaacactttatatttgaagttacagatttagcaccattaatagctgcaatcatttgtatagttattttcaaatataaaaaggttcagcttgctggtttaaagttctcaatcagcttaaaagtcatcgaacgtattttactcgctctgattttacctttaatcattttaattataggtatgtacagctttaatacatttgctgatagttttatcttattacaatcaacgggcttatcagtacccattacacatatcttaattggtcatattttaatggcattcgtcgtagaatttggtttccgttcatatttacaaaacattgtcgaaacgaaaatgaatacgttcttcgcaagcatagttgttggtttaatgtactctgtattttcagcaaatacaacttacggtacagaatttgcagcttataatttcctttacacattctcattctcaatgattctaggtgagttaattagagctacaaaaggacgtacgatttacatcgcaacaacattccatgcttcaatgacatttggccttattttcttgtttagcgaagaaatcggcgatctattttcaatcaaagtcatcgccatttcaacagcaatcgttgcagtaggatacattggtttaagcttaattattcgaggtattgcttatttaacaactagacgaaaccttgaagaacttgagcctaataattatttagaccatgtcaatgacgatgaagaaactaatcatactgaggctgaaaaatcttcttcaaatattaaagatgttgaaaaaacaggtgtagctactgcatcaacgatcggtattgctaaaaatgatactgaaaatacagtggctgacgaaccaagcattcatgaaggtactgaaaaaacagaatctcaacatcacatagataatcaaactgaatctaatcatgatgaagatcatgacatcacttcggagtcagtagaatcagtagaatcagttaaacatgcaccacaaagtgacgatttaacaaacgattcaaacgaagatgaaacagagcaatcattaaaagaacctgcgacttataaagaagacagacgttcatcagttgtaatcgatgcagaaaaacatatcgaaaaaactgaagaacaatcttcagataaaaacaaataataacaaagcgcttgctagcacctcttaagaagatgatgctagcaagcgcttttctatactatatattatttttctaaaattttaacaccctcttgagtgcctacaataacttgatctgccatatctaagaagtatcctgtctcaaacacacctgtcagatgaattaaatactcatggaacttatatgggtcaattccttttggtaacttacaatctaaaatataattgccattatcagttataaatgcgacatcttcgtttacacggcgttctacttttatatcagcgtatgattcaattttacgtaatatgtgataccagttaaatttatccacctctactggtaacttaaacgtctcacctaagtattgaaccattttcgtttcatcgacaaccacaacaaaacgcgatgccatttcatctatcactttctctctgaacagcgcaccaccgccacctttaattatatttaaagatggatctacttcatcagcaccatcaatggctaagtcgatatgatcaacatcattgatttcgcatattttaatacctagttcttttgctaaaaatgcaattttatttgacgtacatacacctgtaatattgtaaccacgttcttttattagttgcgccatttgaggtaagagtaattccattgtacttcctgtaccaattcccagcgtcatgtcaccattgatttgacttaaaacatcatttaatgtcattaacttgagtgctttgacatctttcatgaaggtagcctcccatatttatgtaatctattcaattcatattttacatgactcgtataaattaacatacccttatttctaacatttttttaaacatatcaatcagaatttacaattctaaaaattttttatagtacaatatactttaacttaacgttaaggagaatgatatgatatcaattcacgcaatttcgacaggaaaaatccaagatttgccttatagctcgaaaagaccgatgcgctctgctttagataaaactaagatttcacaaacaacatggttatcttcaactggtttcactggtgatgaacaggcttataaagatcatggtgggccacataaagcagtttgtgggtttagtaaacataactatgcactgtatcaagatgatttaccttcactacctactcatgcgatgtttggagagaatttaacatttgattatttagacgaatctgatgtttactttggtaatcaatatcgtttaggtgaagcgttaattgaggtttctgaaattagagaaccatgctggaaaattcaagcaaaatataatattcctgatttagtgaagcgcatgtctacatctggtaaaacaggtttctatttccgggtattaaaacaaggctatgtatctccaaatgatcagctttacttaatacaagaagcaccaatcgaacatcgtttatctgtacaacagcttaatgacctatattataatgatagacaaaatcaagatatgttacgatatgcactaaacaatccatttctgtcaccaacaagacgcgataaacttcaaaaaatgtataacagaacattgaaataattacctttcattataagtgttaaatgaacttttcaaaacaaaaaggaatcaacttacacatcgtttgtataatagtcttatctataactactgatgctattgattccttttttatgttatatattttctttatttcaaactgtatattaatgatgtcacttcatttgatacgattcttgataacctattcaaaattccgccaaataacataaatattatataaatgccgatacttttaatcattttctactttttcttcgatacggaaacttgttttcgaattgaacacttcaccagcttttaaaattgacggtgctttttcaccatataaattaatatcatttggtaaaaattgtgtttctaatgtaaaaccagaatgtggtttataaatattaaatggactatcccactcatcaggctgattaaaagtaaagaatacaacatgaggcatatctgtatcgacctctaacataaattcatgattttcaacatacattttatgttcaccaactgtaaatgggtgatcgagaccaccaaaacgtgtcatttgttggcttaattgcgcatgttgtgatgtaaaaatatcactcaattttatcttgttatcttcaaacacttcatgtaaatctagaatatcacctgtaacaatatttcgctcatctaatacatacatatctaattgattacttgaaatgcgatgattatcaacgacattattatctcgattcaaattgaagtacacatgattcgtaggactaaacaatgtgtcttctgatgcaactgcttcgtattcaatcgaccattggtgatccgcatcataaatatgtgtaatcgtcacatcgatatcacccgggaaatgatcatcagctgatttcaacaccgtcttaaatatcactttaatttgagcaatttcatttctaatttcataatcaaataacttattgtccaaaccatgacatccaccatgtaaatgatgttcgccgttgtttttttctaactgatattctttacctttcaacttaaatttagcattatcaattctaccgctatatcttcctatagaagcaccaaatttaaaaggattactatgataaaattcatccgcttcaacaacatttccaagaacaatattattatcatgatatttccaagacactactcttgctccataattcgtaaaaataattttagtttcatcattatcaattttgattaaatctacaccttgtctttggtgctcaacttcaactatcatttttacttctcccttctaaccacaagtgttcaagctctgctgggcagcaacattactaaaacacctacaatacaaatgattgcaccgataacatcatatttatctggcatttgtttatctacgaccatcgcaaaaatcaaactcatgatgataaatacgccaccatatgctgcatatactcttccgaatgatggaaatgattgaaatgtcacaatgactccatataacatgagtatcacaccgcctattagcccaacaagtgaagactgtccttccctaagccacagccaaatcaggtatcccccacctatttcacataagtcagctaatataaatataaaaatcggatataacatgaaatcactccatcacacatttgctaccaataatctttcggctacatatcatttgtttacatttcttcttacttcacattcccattttaaaaagttcgttttcacattcatattgtacacttttttagacattattctatagctaaatataaaaaaataagagtaacacgctttcatcatcattttatatgataaatgtgtgtcactctcatcaattttattttttaaatacacgtttcattgaattaaataagccacgttcaaatgtaagtactgaatctttatatgttttaattgcaatccatatcaagacagctaccattacaattgagattaatgaacttaagatgacttcatgtatttgaagccctgaagtttgagcgcgtacaactaattgaaatggcgctaaaaacggaacataacttgtgattaaagcaagttgcccatcaggattatttatcgtgaatatcgcgatataaaatgcaatcataccaagtaatgtcagtggcatcaaagattgatttaaatcttctattctagatgttaatgatccgagaatggctgcaagtaatacatacgccataattccaacaatactacttataattccgacaataataatttgccaagacaattgattcatttccacgttaaaaccttgtagcaagtcttttaagtcaaaggcaaaaatgcatataactgccatcaatacaattaaaataatctgagtcacggcaactgctataacgcctaaaattttagcgaaaatatgttggattggtgaaatacttgtaataatcatttcaatgacacgtgatgttttctcactagcaatttccatagctatttgagatgcataatttaaaacaataaagaacattagaaagataatgccataagctaaagcatagttgaaaatcttttgtccttctgatactttatcgacttcatcattagaaatcaccttattatcaactttactttgtgcttgtaatttttgtaagtcttctttgttgatatttaattccccggctaccatatttgtttgaatagctgtaagcagtgcttgtactttttgtaaatcttcatgacttactcgcttctcactaatgattgtcccttgtaacgagcgattttgattcaccttgataatataagctttatcaagtttatgtttttttacttctttttcagcatcttctatagaaactttagtaaacttagcatcactatgaaatgtattcgcctgttgcttgaaaaccttatatatttgttcattcggtgccgctacaccaattttatctggaccatcatcaaacatgttaataatcttatcaatgttagataggccaatcattaaggcagcaatgataatcataaaaattacaaatgatttagctttaatttttttgatatatgtcaaagtaaatgtcgcccaaaacttatgcatccttgccaccaaccttctcaatgaatatatcttgtaatgatggttctacaacttggaatcgtttaacataaccttgatgtgccacaacttgataaatatctttggctacgtcttcattctcaatcgtcaattgaagaccttgcttcatgttttcactatgaatgatgcctctaatgtgtgttaaatctggtagtgttgtttctgattcaatgacaactttcttgttaccattagatgcacgtacatgattgatatcaccagaaacaacaagttgacctttatctaaaatacaaacatcatcacataattcttcaacatgttccatacggtgagaactataaacgattgtactgccccaatcatttaagtctttaactgcttcttttaataactcaacattaactgggtctagaccactgaaaggctcatctaatattagtaattctggtttatgtaacatacttgctaacagctgaattttttgttgattcccttttgatagactatcaattcgttttttacggttttcagtaatatcaaaacgctcaagccaataccatatttgctgttgtatttctgtttttgacattccctttaaagttgccaaatatttcaattcttcttcaactgtcaatttcccatgtaaaccgcgttcttccggtaaataaccaatacgattgtacattgttttatctagttttttaccgttatacgtaatgtgtccttcagttggttcacttaagcctaaaatcatacgaaatgtcgttgttttacctgcaccatttcttcctagaaaacctaacattttgcctgattctaactctaatgacatatcatttactgccgtcatcttaccaaaacgtttcgtaacatgctcaattacaagtcccatcttttgcctcctaaaacaatatgtatttatcttaatataacatttctattctctataaatacaatatttttaaagtgaatttatttttaaaatttctgaaattgaaatatttaaatagtatcttctttgcatgttaagtatcatgagcgctagatatgcttttttccatgcctttattgccttattggtaaaaaaaatatcccagcaacaatctgctgagatatctatatcattacaattgattatctgtttcttccggttttttcggtgtttcagatgtcactggttgatttttaattgaagatgggtattttgggctttcgccatatttatttgccggcttactgtcaaagcataggaatactatcattgtaactgtaagtccaaaataaataagatatagaagtactaacaaaataacaattccaattggcataaacataaaatcattatcataatatgattcgataaactgcaccactatagagaatacaatactatatgcacacattataataggcaataccattgttcttgatatatcgtggaatcttcggacgcttaatgccaaattgggaataaaggttgctaaagaataaagaagcatatatataactgtaagtattaatatcatcacaccaaacatagataatactttagcatctatttcatcacctatacccacaaatactgctcccataaagaacacgaagaaagcaggaagtataaatattaaatgccacaacatcatataccaatattcactacgtcttgatctccccttaaaatttacataatttttccaaaataatacgaatgatttcataaaacctacttgaggtaattgttccattgtaatctccctttcgttaatcatatttatatttttaattattattaccgttataatttacaagattcattatcaagccacttcatttcaatcgtcattcactttggaaaatgaactttatatttcatcactagttaaatgaaaacccgctacaagtacgcatctatatggagactcatttgaaagtcaacgcttcgttaactatactaaaaatatgtcacactgtaatgttcacgtttagaagagtctcaatctatgcaaataaaatattccataacaaagtatatactttacatttttataattcttaacaatactattttaacaaacatttaccacaataaaaatatctttttcatttttatttaaattaatcatataattgtgaggagaatattatggatttcgttaataatgatacaagacaaattgctaaaaacttattaggtgtcaaagtgatttatcaggataccactcaaacgtatacaggctacatcgtggaaacggaagcatacttaggtttgaatgatcgtgcggctcatggctatggtggtaaaataacacctaaagttacgtcattatataaacgtggtggtacaatttatgcacatgtcatgcatacgcatttactcattaattttgtaacaaaatctgaaggtatacctgaaggcgtacttatccgtgcaattgaaccagaagacggtttatccgctatgttccgtaacagaggtaagaaaggctacgaggtaacgaatggcccaggaaaatggactaaggcatttaacattccacgggctatcgatggcgctacgttaaatgactgtagattgtctattgatactaagaatcgtaaatatcctaaagatattattgctagtccacgaatcggtattccaaataaaggtgattggacacataaatctttacgttacacagtgaaaggtaatccatttgtgtctcgcatgcgtaaatcagattgtatgtttcccgaagatacttggaaataaatgtcatctttcattgattactatcatgaaaatgaaatctatctccttataagtcaatcaatcgtgccgtcaacatgcggatgggttgattgtttttctttgtatccatcatactttttgattcatctcctctttttgaacttgttcttaattttaaaatataacaatagaattatttataattattaaatttagatacattaatattattgatattattttcaaaaactagaaatattgatttattgcatgtataatgttaaaagtgcccttttataacgcttacatataaaagcttatttagggagagggatattcaacaagggggatttgaaaatgatagaacttaatgcaattacaacattatgtttagcctgtatactttacttacttggtaaagctatcgttaatcacgttaattttttaaaacgcatttgtataccagcaccagtgattggcggcttaatctttgctattttagttgcggctttggattcatttggcatggttaagattaaattagatgcttcattcattcaagatttcttcatgttagcattctttacgacaatcggtcttggtgcatcattgaaattatttaaattaggtggcaaagtcttgctattatactttatgttttgtgctatcatttcagttattcaaaacatagttggtgtatcactagcaaaagtattaaatattaaaccgttactaggattaacagctggttctatgtctatggaaggtggtcacggtaatgctgccgcttatggtaagacaattcaagatttaggtattgattcagcactgacagcggctcttgcagctgcaactttaggtcttgtatttggagggcttatcggcggaccagttgtaaaatttttgatcaaacgttataacttaaagcctcaacatagtgacgatacatttaaagattatagccaagtagcatataacgaacatttacatagtaaatttaatgccactgaagtattcttcattcaatttacaatcgttgtattctgtatggcagttggaagttatttcagtcatttgtttacagctcaaacagggattaatgttccaatttacgttggctcattatttgtagctgttattgtccgaaatatctctgaaagttttaattttaatattgtagatttaaaaattactaatcaaattggcgatgtcgcattaggtattttcttatctcttgcgctaatgagcattcaattaatcgaaatttataaacttgctatacctcttattattatcgttttagttcaagttgtcgttatgattttatttgctgttttaattttatttagaggtttaggaaaagattatgatgctgcagtaatggtaggtggttttatcgggcatgggcttggtgcaacgccaaatgccatggcaaatttagatgttatcactaaaaaatatggaaactcacctaaagcatatttagttgtacctattgttggtgcattcttaatcgatttaataggtgttatagtcattatgggattcattcaatggtttagttaaacacccaactcataaataaaagaggaggctttcgcctcctcttttatttatcctcgatgtatattcaagttacgttgttctatccatgacaatatttccggactaaatacgatttgtttttgtgttaagtcgtcaatatttttagcatctaacatcgtcattattgatttcatgtgttcaataaatgattctacataagctactgtatgtgcaatgccattattttcaacttgatttaaaaacggacgtgacataccagttgcctttgcaccaagtgctaaacttttaattgcatcgagtggtgtacgtaaaccaccactcgcgaaaactgaaatttcgctttgataagccgttgtttcaagtaatgactcaactgtagactgtccccatgatgataagtaatccatatctttatttgcacgacgttcattttcaatatctacaaagttagtaccacctttgccactaacatcgacatacttaacgcctatttgttgtaagtcatgcattaattctttactcataccaaatccaacttcttttataatgactggaacagacactcgtgatacaatcgacgctatattatctaaccaagtcacaaattcacgattcccttcaggcataactaattcttgaggagaattaacatggatttgtaacgcttgtgcctcaagtaattcaactgcttccaaagccttttctactggtacgtccgcaccaacattgctaaaaatcatgccttcaggattcatttttcgcgcaatcgtaaatgtctcagccatgcgtggatttctcaatgccgcatgtgttgatccaactgccatcgctaagccagtttctcttgcaactacagctagcttttcattgatgtttttcgtccactcgctaccacccgtcattgcattaatataaaccggatatgccatcgttaagtcagatgtctgtgatgtcaaatcgatatcatttacattaattgatgggatagaatgatgcacaaaacgcatcttatcaaaatctgaatccattgcgtcagattgggccattgctatttcaacatgttcattttttctctgttctctttgaaaatcactcatgattaaacctaccttttcgtcatttctaatttaaaaccattttttacgtctgaaaaagatgattaatacgacagctataacaaacattacagctaagcaaatataatatccataatgtaaatgtaatgccggcatatttacaaagttcataccataaatcccagctatgaatgttaacggtgaaaatataactgatactaacgttaatacttgcataatactattcattctaaatgatgtgtatgactcaaagttttctcgtatttcgtttgtcatttcttgagcagtacgaatgatattacgttgcttaatcaagtggtcatcgatatgttgaatgtatagcgaatgtttattatctataatcaaatcaccattttgtttcattgtatcaattagctcttgcataggaaacagtacacgttttactttaatcaaatccgaacgtaacttaaaaacactatccatgaccattttattaaagcgatcatctacatggcggtcttcaaaatgataaacactatcttcaagtgcatatacaaagttgaaatatttatcaaccatcatatctaaaattaatatgacgacatctgcacaatctaattctgcatctaatgtattcatatacttatagactactttatttaatgattccaacgtttgatgatgatatgttactaatacattgtcttgtataaaaatatttagtgctattggtgaatagtttgaccccataatactatggaatactaagtattgataatctttataagatttatatttagctcgtggcataccgttaattgcatcatccacttctaaatcattaaaactaaaatgtgctttaaaccattcattttcttgttcattcggttcatcaaaatcataccaaacaatagtcgcatcttttggtatatctttgatatcatcaactactttaaacggttcgtatgtagtttgataccgtatcgttaaagccatcgatactccccctaaataacaaattctctattattttatcatgaattaaataacgtgtatgtcttaatttattttagtatgatagttactaaggagatggttattatcaaacaactttttacacatactcaaaccgtaacatctgaattcattgaccataacaatcatatgcatgatgcaaattataatatcatttttagtgacgttgtgaatcgttttaattacagccacggtctttctttaaaagaacgcgaaaatttagcatatacgctatttacactagaagaacatacgacatacctctcagaattgtctcttggcgatgtatttactgttactttatatatttatgattacgattataagcggttgcatttatttttaacattaactaaagaagatggtacactagcatcaacaaatgaagtaatgatgatgggaattaatcagcacacacgtcgttctgatgtttttcctgaatcattttcaacacaaatagcacactattataaaaatcaaccaactatcacttggcctgaacaattaggacataaaatagcaattccacacaaaggagcattaaaatgacagatgcattacaacaaaagattcatatcgaattactagatttattagatgatgttaagtttgaattaacagaattaaatgcacaaaaagggttatacattaacggaccagcaaatcagctacttaagcgtggcgtacatatggcttatgttcaaggacaaaagcaagctatcgataatattatgactattgtggaacaacagcttgaagatcaacatttcctagaacattatgataaatttcaaaatgaggttgctcatcgcaattatgataaaacagctaactttgcagaacttagtgatattccacgtcaattcgataattttttagatcagttttatcaaattaaagggcaatactttatcatcacacatatcaatacacttattggtgattttcactcagaagctcattaacaattagtctatataatccttgctatattttcaaaaacaaaacccagttgcgttttcatgtcaaatatcttcttccatgaaatcgtaactgggtcaattgtacgttattagttattttgtgttacatcctcatctatcgatttggcaatttgtttaatagctttatgtgattgtctaattggataaattggaaaatcatgtaccatcttaggataatcataaaactcaatgtattgatgatgttgcaacatcatttgttcgaatagcttcatatcaggatgtgtcatttcacgtccaccaccaaacatataaactggtggtaatccttctattgtgccattaatcggcgatatgcgcttatctgttaatggtaggccattcgcccactttttcataatctcattgacaccaaactgacttagaaccgcatcttgttcgattaaagcgtccgaaatatctttattagatagtgttgcatctaaaattggtgagattaaatacaatttattcggtaatggctgttgattgtctaaaagagattgtacaaaggataatgccagtgcaccacctgaaccatcacccatgactacgacattttgatggcctacttcagatactaattgatcataaacacgttgtatcgcttggaaagtgtcgtcaatatgaaactctggtgtctttggatagataggcagtacaacctcatataatgtacttaaagtgattttatccaacaatctccaatggaacggtgatggttgtagtgcattgaatccaccgtgaatatataaaattttcttatcaatttgatgtctgaaattaaagcgaaagacttgcatatcatctaatgataatttttctaaatttgctttaacatttaatgttgaaggctgcttatgtttttttctattttcaatttctcttttataaaaaaatctttcaacatcttgatcatttttaaacataatcgagcgattgtgaagcaaatatttattgacaacgctattcataacacggtttctaatcaatgtcttaacctacctttatatattttatgtatccaatgattgtctatcccctacattctttgccaaaaaaagtatataatgtagaagatattttctttttcactttcaaatttaagactacaattgaacagtgatttttcatcattataacagacaactagacatattgataagtaaagaaaagaactttatacggaggtgccttgcatgacaaatccaaatcaacgattagaaccatttgatgagacatttcaacaaccgaatattcatcgtggtaagcgatatggtaagaaaaaacgttcattggtaagcatgattattcaaatcattgttgttatattaaccgcaatcgctggatacagcatgtggaaacaacccatttttaatattgtcttcaccaaagaatctgtagattttgatggcattaaaaattttaacgagacaattggaaaaatgcatcaattaaatattaatttgggtaatatcaatgatttacaacaaggaatcgatcgcttaattttagtctttaacggtttctttattttatgtatcgttagcctagtcataacaatactgacaattgtatttaatcgcacagttctaaaagtagtaaatattttagtgttaacaattatgttagtcattacattgtatttcagttatattattaaagcactcgcacaagaaattgcagatgctttaaaaaaatattatttaaatgtaccaccagatcaagtgattacagaagctgacgctattcataacggcatcattttactgggctgtagcatcggtttacttgttataagcttattcttccgtaatcgcatgcctcgtttaaaataatgttatatagtagggattgggacagaaatgttattttcacaaaattcatttcgttgacccacttcctgctttttctttattaatgacctactacatcaatgccagattttaatataattcctctaacattttacaaatcaacgaataaaaaaagtatcgataaccatatattggcaccgatactttaaaaatcatgtccccacaacataatttttgattagtcacacttcaattaatttattttatttattcatgattgatactattatctgcgtctatcttttgagccgtagcttttgcttttttgttgctttgtaaaaataagcataaaattaaagcgatgatgctaaatatcgttgcaactataaatgcatcattaattccttcaactgttgctagtttatttacaaattgtaataacactttcattgcgccttcttgaccaccatattgcgatgctaattcacgcatatgatcttgtacaacaggattcgttttatctaactcttccccaaaagctgataaatgttgtgtagtttgtgttgtcattacagtaaccaagattgctgttcctatagaaccagctagttgacgcatcgtatttaagaaggcattaccatgggaggcaagtcgtcccggcaacgcattaatagctgctgttaccattggcatcataataaatgccataccgaatgaacgtagtacatagatgcccatgattgtcatatatggcgtatccatattcaatttagttaattcccatgttgcataagtcatgacagcaataccaaaaatggctaaaggttttaaaccaatcgtgtctaacaacttaccagcaaatggtcctagtagacccataattagagaaccaggtaataataacaacccggaatctaatgctgagaaaccacgtaaattttgtaagtaaattggtaataaaatcataccaccatacaagctcatcattacaaccatattaattactgttgttagtgtaaatgttggaaatttcaatacttctaaattcaacattggtgctttcattcttaattctcttattacaaatagaataataaagataataccaatcgcaaacattgtttctatctcaacagaaccccagcctttgttacccgcttctgaaaagccgtataacaaagcaccaaaaccaatcgtactaaaaatgatgcctgggatatcagctttagggtttgttgtatattgatataacttaaaccatataaaaccaactaagattgcaataattccgataatgaacataccgtaaaacatcacattccaatggtaattttgtacaatataacctgataatgttgggccgattgcaggtgctaaaatcattgcgatacccattgtacccatggcagcaccacgtttttcaggtggataaattgtaataataacaattgaacctaatggcattagtacacctgcaccaatggcttgtaatacacgtccaaccatcatgattgggaaattcattgaaattgcacatattaatgaaccaattgtaaagagtactaacgcaactaaaaataattttcgatatgaatatttattaaatagatacgccgtaattggtattaaaataccatttactaacatgaatcccgtcatcaaccattgccctgttgacgcagaaatattaaattccgtattaatttttggcaaagcaacatttaataatgtttggtttaaaatcgcaataaacataccgaataataatgccgctaatattttaccgcgtgaaacaccctcaccaaaaataaagtttttatgttcttttttaattttctcatttactttatattcttctgattcaggatttttagcagcaaatgctacatcatccttattatcattgaataattcttgatcttgttcagacccctctgtctgtttgtttagactaacttgattctgattatcttgattgtcaatacgtgcctcctcacgagccgtatgttgtgacgactgatcagtagttttgtctaaatcacttgctttaaatttagattgatttgattgacgtgttgcaaaatgttgttccttttgttggcgttttgcttttcttctagatcttattaaaaataaattgatcacaccaacaataatgagcgctaaaacaatgtaacttataatgaaggtcgtagtcatttaatgacccccttaatttttatggatttttacttcagcgttcattccaggaacaacttgtttagacggttctgattctagagtaattttaacaggtataacttgagatactttagtatagttaccgtcactatttgatgatggcattaatgaaaagcttgcagcagtagcttttccaatactatcaactttacctttaatagaagctttttgaccgtcaatagtcacatcaacatctttaccaacttcaacatctttaatatctttttcgtcaatatttgcagttacatataaatcatctaaattataagcatatgcaattggattgcctgcttgtaccatagaaccttccatgccatctaatttagcaattgtacctttttgtggcattttaagttccatatctttagtttcgccatcttgaccttgaacagtaactgttgctactttatcacctttatcaagtttatcaccttgcttaacatttagtgatttgatttgcccagaagctggacttgctattttaatttgatcgccatttactttagcattatcagttgttatataacttgttgttttattccagaaataaaaaccagcaatcccaattgctagcagtacaacaaccgtaatgacattaattaatatcatctttttcatgaaacatttcctcctatttgcttttaaaattcacttaatttattatagagacatgataactaaaaaaacaccaacaatttttataagagtgttggttaaaattcacaaaggtgtaacaatatgaaacgacaagccaaaatagaaattcaaaacgcacttgttgatttgatggctgaatatccttttcaagaaatatccactaaaatgatttgcgcatattgtaatattaatcgttctactttttatgattattacaaagataaatttgatttattggataccatcaactcaaagcataaagaaaaattccaatttcttctaagcgcgctacatcataatttcgaaaatattaaacaggataagcttaaactttataaattcttcattattattgctaagtatatcaagcgcaatgagcagtttttcaaagacattttagttacctatccaatgaaaacattattcatagactatataaatttagcgagagattactatcaacaaattatgaatgactatagtactacagtaaccaataaacaactttatgttacatatatcataggcggtcaagctggggtatttattaattggctttcgaatggttgtaatgaatcacctgaagaagttgctgacattttattggctaatacgattaaacttcaaaaccaataatacggtttcattctaataaagaaatgctataaaacaatcagataaagttaaaccaaatggacagataatagtacacatgtaacggtgctatcaatacaaaaatgccgagatttccacataataatctcggcatttttatttttgatgctaaattcataggtctatgaatagctcaagttttgttttttaatttttaaattcaatataatagaagaaactatgtttatcatcgatttgttttaaataccttcatattataaatctgtaaaataattaatataactgctgtagctattataataattatgtaaggtataggattatcttcaccttttacccccactaatggcgaagcaacaccaccaaataaaaactgcactaaacctaataaacttgatgaactccctctaccactactactttcatccatagctattgtaaaaccaagtgtcgcaacacctgtcactggtgctattaaaatgataaatcctatcgctaaaatccaaaagttccaatgattaagcaatacaatcgtcactaaaattacaccgataatctgaatcatcgtcatgcctctcatcaatttttgtgagtctataaaatcaacaaggtacccagtaagttgacttgatataatgagcgtaataccaattcctgcaaacatccaactaaattgtattgcagtcatgccataaattttttgaataataaacggagacgcagaaatataagtaaataatattacaaatgtcataccttgaatgagcattggtaatacaaaacgtggcgtcttcaataatattttgaagtttttaaacattgtctttaatccactacttgactcacgatttgtcactgttaatgattcaggtacttttaataaagaacctatgaccatgacgaagccaaagatagtcagaatgacaaagaccatacgccagacagaataatttaaaattatgccccctattgttggcgcaacaactggtgcaataccattaacaagcatcaataatgccataaacttagttagttcattaccactatacatatcacttgctatagctcttgaaataactgctgctgctccacctgtcactccttgaagaaatcttaatgcaaccatcagccaaatattatgtacaaaaacaatacctaaacttgctaatgtaaaaataatcatagctataataagcggctttctgcgcccagtagaatccgaaattggaccagcaaacaaattaccgaacgctaaaccaatcataaacatcgataatgttaattgtgcgttagacgtcgttgtttgaaaatcatgtctaatatctggtaatccaggcaaaaacatatctattgataatgctccaatggcagtcaaagatcctaaaataataataaatatcggtgaacgcttgttaaaatgcgttaaatcattcatatgactatctcctttatattatgattagtttataactatcacgaacagaaactaaatttaaatatgctcttttatatattagcattactcacaagtttcatgaacatcattacaacttataaaaggtataaaatgatataaacctcagcactccataattttttcacaaaaaacaatcccttcaaagtaattcacactaattgtaaatactttgaaaggatgttgtttgtattcaatgacacatgcatcttatttaagatttatactctatttttctgatgtcttgattaattgcaagcggtcttgtgaaccttgttcaagctcatattctttatctacttgcttaccgttttcatttattaatcttacggttgcggtaatcttatcaccatgtttttcggcatctataatttgtggtgaactaatcatcattaaacttcctttagatacacgcttctttacatcatcataaaaagatgatcctttttttatatatgacgatacaaaatcaaaatccgactgattaaacgcagcattattcgctaaagaatatccagcaaagaattctatcaatttgttcttcaagctgttttcttctttttctttcttttcaacatagtcttcgatatcttcactgtcaaaattcaaagttatctctgtattgtattttaaatcgctagctttaatcgtctttgtctgtgttgtaaatgttttatctttcgctttacctgaagctgaaatggtaatatctttattttgtggatatggaccatacgttttggaacttgaaaatgccatttcacggtcatttatagttacttttttagaactatcatttaattttgtatcgccttttaaagttacagttatatttgcttcttcaaaatcttcagtaacatctaccgtttcagaattactttgtctaaaatcaaattttaaatggcctgcaaaatcaccgttctcagttgatttcatagctggaattctatatgtccccggtataaaattacctattggcgtcactttatttgcttcagctataaccatctttttcttaccaccagatttaaactcatattttgttttttctttcggtttaacaattggttgcttggtaggtgcagtaaagctcatattatcgaaaaagatataacgcgtgccatttttacttacacgtaatatattttgacctgatctggtttgaatataagaagctacgctggtcttactcttattcaatttatgtaccgtatttttaaggtcgctgacaaattgcttaagcccaacttcatctttgatatagttaatgtatactttcgcttcttcagaatctactttattatctttagtacttaataatgttgctactttttgtttatcattattctcaatcgcattcactaatattttagtttgcgcttcaggtgaattgaagtttcttagtaaaaagaacaatataataattaagattaaaatgaaaaaaccaattgcccaaggcaccatttttctcatcttgatgttattagtttgtatatcttcatcggttgactttctatataatgcttgacggctatcaaatttatgtccacattgtgtacatatctgtacatcatcttgtgcttgttgtccgcacttcgggcaagatttcatactttcacctcaattctgttcctcttcaattgttatatgtatatcacaaaaattattttattattttaccattattattttacaaatattatcccaagaatacaattcaagaaatgattaactttactttagaattgtaccttattacattatttatgaaagtactctctcaattataactaaaaagaaggtgttcaatacatacatatttagtcttatatttgaacaccttcaaaaacctatttatgattgctatatgttttaatgcgatgattgatgacttctaatacttgccttacattttcaatatcttcagaattcaaatcattagtaatatcttgcgcaatatctgtcataatcgcattacgttctttcaaatatgctctacctttgtcagttaaggttatgaatttcaaacgttgatcaatatttaaatttggtttatctaacttaactaatttagcatcgattaactttttaattcgtcggcttactgcggccttattcacaccttgtctttgcgtgatttcactaattgtcaaaggttctttatttaacatacctaatacgttagactgctctaatgaaatttcatattcattttgtaaatctttcaacatttttgcagttaatgcgttaacgttatttataaactgctctaaaaattgaatatggtcttgtaaatgttttaccataattatttctccctaattactatttttataaagtatcctcagcaatcattgtatcgcacatctaaaaaacacaaaaatattgacccatatataatataacaaattaagacttacatgttgctacgttctccttgctttaataatttaaatcatctacatttatacttaatatttattataagcgaggtgtcagtatgttattgaatttattattaatatttatacttatcgttatttgtccgttaattttcaactatactctgacgttaaatttaacatgctacatcttagttgtcatatcgatatttttgtcactcatctatagcatcatgacctatactttcccttggtctatgtttgtaacatttataataatcagtattatcatgctattcaaacatagatatttattttctcatacttctagtcgcttatttattaaaaaattattatctttttcatataaatttgtactctacacatcagcacttctatttataagtacgattcagtcacctattgtgaaaggtttgtctatgtggttagctatattatgtctttccctgttactaacctttatttgttatctcgtttggacagtatcatatagacatagatcatacaacaaagaagttgatatcataattgtgttaggtgctggtatttttaccgaatttgtcacaccaatgcttgcagcgcgtttagaccgtgcacttgatatctatcaacaacaagcatcagcaacaaagatcattgtatctggcggacaaggaccagacgaaccaattcctgaagctttagctatgcaacgttatttgattgcacatggtgttgataaaacagatatactaatggaatctcactctataaatacatacacaaactttttatattctaaacaaatcatcaacaatttgtatcatgaagcagttaaaattgtttgtgtaacaagtcagtttcatgtattacgcgccttacgactagcccaaaaattaggtttatctatcgatggtgtcggaagccatacaccatatcactttttcttacatgtgctcattaaagattatctaggcgtaatgtatcagtatagattgttattaacgttatattgttcaagtagttggtttatatgtctttacgccgcttttatttatcatagttaatccacaaataaactattattataggttgtttttaatattgcgtcaaactatctttaaatattcgttaatccttgattagacaattgttatattgaaaataaataaactaaagcacgtcatcattttatacaatagtgacgtgcttttttgtaaacccaaatcgtattctcttttataacttttatactactacgtcttaaatcattaacatttagcgtctttgcaagccactaatcagttattttgccatcttctaattcaatcactcgatctgcatattcaaataatcttcgatcgtgtgtaatcataataccaatcatttgttgttctttaatttgttgacgtatcatctcaacaacttttgttgctctatcggcatctaaacttgctgtgggctcatctgctaaaatgattttcggattattcataaatgctctcataatcgcaacacgttgcttttcaccgccagataactgatgcggatatacattcaagcgatcttctaaaccaatatttttcaaaagttgtattgctcttttcgaactttgttgtttggtcattcccgcttcttggcctacgagtgtcaattgctctatcacttttaaataaggaactaaatgtgaagattgaaaaataaaaccaatatcttccaatcgtaaatcactaggacgatgctgtttatcaaacaatggtgcatcattgtaaagtactgtaccactcgtttgacttaacaatccgcctaatatcgttagcaatgttgttttcccagaaccagaggcaccatttaaaatgacaaattccccttgttctacttcaaaattaataccttttaaaacttttgtttcagacaaaccttccccgaaatttttgacgatatcttcaacgactaatgccattattctgcacctccaattgcttcgataggatccactttaaataatttgataaatgatagtgaggcacctaaaatcgctactaatataaatatccccaccatcaataaaatattttgcgttgttaagtaaaaaggcatcgttacaggcatcataaatgatagtcctactatgatgatcacagcaatacctaccccaattattgttagtgttaaaatttgtaaaactaatgcactcaataaatgtcttgtcttaataccaattgctttcaaaatgccaatttgtgatattttttgaatcgtcataacatagaaaaatgcacttagaacaattgctgtaatagcaaacaaactaacaatcatcatatttaacggtgcttgctctgcttgataactcgcaatattacctgttaaatctttttcactcacaacttgaacgtcatttattttattaagctcatcacgttgttgttgcgttaaatttttcactggataaaacgccgtattaaccttattcaatgcattaaatccgttatcgttcaatagcacaatggaactatgcgcatacattgtgtcgtttaaaataccagaaactctataactagttgaattatttttaaaatgtaatctatccccgactctaatgttgtctgcagctaacttatcattaatagcgacctcatgagcatttttaggataatcaccttttttaagttgtaagcgttgttgtttaacgtcattcattgtaatcacatcttgttctttattagataatttcaatgtttgaacattcattttatatggttcttgatgaattacctttttaatttgattctgttgcgtatcactaagttgcgatttctcaatttgcggctctttcattttttgaacaacatattcatcattatcaaagtgttcaaataacgaaatattctccctaccaagcccttgagctaaaccactaataaataacaccataatacttaataaaagaatgattaatgtgattaaaatataacgaaatttgtaaaacataatctcttttatcgctaatttcatatcgattcacttctccctatttcttctttagcgtcagtataaggttgaaatatgaactcaatatgaacaattgtttttttacgcaaaaatattttacatgtataataaatgaaaaagataagggagtttatagctatggtgcaatgtcttgttgtcgatgacgatcctcgaatcctaaattatatagctagccatttacaaacagagcacattgatgcatacacacaaccaagtggtgaagctgcattaaaacttttagaaaaacagcgtgtcgatattgtagtggtagatattatgatggatggtatggacggctttcaattatgtaatacattaaaaaatgattatgatataccagttattatgttaacagcacgggatgcacttagtgacaaagagcgtgcgtttataagtggtactgacgattatgtaaccaagccctttgaggttaaggaacttatttttagaattcgtgcggtattacgtcgatataatatcaattcaaattcagaaatgaccattggcaacttaacgctaaaccaatcctatttggaactccaagtatctaataaaacgatgacgttaccgaacaaggaatttcaattattatttatgcttgcagcacgtcctaagcaaatctttactcgtgaacagataatagaaaaaatttggggctatgattatgaaggagatgaacgaacagttgacgttcatattaagcgactacgccaaagattaaaaaaattaaatgccacacttacaattgaaacagtaagaggacaaggctataaggtggagaatcatgtttaaaacactctatgctagaattgcgatttattccattacggttattttatttagtgcattaataagttttgtattaacaaatgtttactatcattataatttaaaagcatctaatgacgcgaaaatcatgaagacgcttaaagaagcaagacaatatgaacaatcagctaaaccaacgcacattcaacaatatttcaaacatttagggcaaatgaattaccaaataatgaccgttgatcaaaaaggtcataagacattttatggtgaaccttttagagaagatactttatcacaaaatgctattaacaacgtattaaataataaagattaccatggtattaaagataaaccattcgcattattcgtaactggatttttcgacaatgtaacagacaatactgttggtattaactttaagacaaacgacggttcaatagcagtattcatgcgtccagatattggagaaacatttagcgagtttagaacattcttagccgtcttgttaatgttgttattatttatctcgatttcattagttatcgcatcaacctattcaatcattcgtccagtaaaaaagttaaagctagcgaccgaacgcttaattgatggtgattttgaaacacctatcaaacaaacacgcaaagatgaaattggaacattacagtatcactttaataagatgagagagtcattgggacaagttgatcaaatgaggcagcattttgtacaaaatgtatctcatgaaatcaaaacaccattaacacatattcatcatttattaagcgagttacaacaaacttctgataaaacattacgacaacaatatataaatgatatttataccattacaacgcagctgagcggattaacaactgaattgttgctcttatccgaattagataatcatcaacatttattattcgatgataagattcaagtcgatcaactcattaaagatatcattcgacatgaacaatttgctgctgatgaaaagtcgttaatcattttagctgacctagaatcaatcgatttcctaggaaatcaacgtttgttacatcaagcattgagtaatttattaataaatgctattaagtatacagatgttggtggtgccattgacatcgctttgcaacatagtcacaacaacatcattttcacaataagtaatgatggttcaccaattagtccacaagctgaagcacgtttatttgaacgtttctataaagtgagcaaacatgataatagcaatggtttaggtcttgcaattacaaaatccatcattgaattgcatcatggtacaatccaattcacacaaagtaacgagtatgtaactacctttactattacactgccaaataattcacattaatctctactctgcctcctgaaaaacatttctgtttttatttcaggaggtatcttttatattgattagcgctttctagccacttaacatttaatttctaccattcaacacaatttaaatatatctatggtcgtttatggtttaataattttgaaggaggcattaacctatgatgaaactcaatttatttatcaatgcaaatgagacggaatcttatattgatatacatgcacctaaaatgaatgatcacgttcaaagtattattaatgcagtcaatgatttagacaaatcacatacattagtcggatacatagacaaagaaatccatatcattcagatatcagatgttataacattccaagttattaataaaaatgtaacagccattacaagcaatcaaaaattcaaactaaaattacgactttatgaactagaaaaacaattaccacaacatttcattcgcatttccaaatcagaaatcgtcaacaagtattacattgaaaaattattattagagccaaatggacttatacgtatgtatcttaaagatgcacactacacctattcttctagacgttttttaaaatctataaaggagcgcttatcaatatgaaaaatttgaaaaactcattatttattagcttaatcattggtttgtccctttcactgttctttagtatgttatttgcagacggcaaatattatccactgaacccacaatcaactattggcatatggtattatacgaatttcacagaaactaccgtaatgttgatttctatcattttatggttactcataggcgtcgtctttttccttggagattttatctttaaatacacagattggggcattactaaagcaactatagtgcatttcataacaacgtatgtcggattcttacctttagcaatacttgccggttggtttccactaacaataaattacctaatcatatttacaattatctttattgtggtttacacattgatttggattattcaattctttaaaaacaagaactacgtagacactattaacgagcaactgaaacaattaaaatgatttttattaaaattataaaagctatacattgcattaaagtagtctcttctgcaatgtatagctttatgttgtatttattttaaatacgcatgaactgaataatatctttttactattttcaaattgaattgtaactacaactgtcctttacgacatcaactcatcatgataaaaacctaacgaaatgcattttcaaatattttattcataatttctgctacttctttaggactctctttatatcctcgtttgacccaatcttgtaacacaccaatgattgcattactcataaaaataagtaaaaaatacttttccttcgtcgttaacatttttgtatttaatactggtacaacattaatttcgatacgttgttgtagtgatttttttatgacttgatgtaatttataagcactctcatcacctaataacattaaaatgagttgaccttcgcttagccaaaaataaatcatcttttttaaaaatattgcttgtgtcagagtttcacttttaagaaatttcttttttgcttcttttaacaatgtattaagatagctgtatataaaatcatctttagttttgtaatgtgtataaaaggttgtccgacttatttgactcttttcacatatatctttaacagttatatcattatatgccttcgtttttaatagatttatcattccatcatgtatgcgatttatcgttttcgttacacgactatccgtaaaagctgtttgatccatatgcctcaccttttttctgaacactaaaaggagatatgttcactatctattaatattttattcgcaatcttaatatacgcttaagatgatatataaataaagtgaaatgtatctcaatttaggaggggttgtcatggacgcaactatcgcgaagttggataaagttgtaaaaacgtataacaagcatcacgtattaaacgaaattagtatgtcaatcaataaaggtgaactgctagggttaataggtcctagtggttctggtaaaacaacaacaataaagtgtttactaggtatggaaaagatagattctggatctgcagaaattttcgctcataagatgcctaatcgcaaagctttaaatcgattaggctatatggggcaaactgatgcattatacgaaaacttaactgcttatgaaaacctagagttttacggtcgtttgtcaggactaaaaggaaatttattaaaagataatattgaaaaacatatcgttctagtgaatttagagcaagcgttaaataaaaaagttgcacagttttcaggaggcatgaaacgccgattatctttagcaataacattgttggccgaaccagaattaatcatattagatgaaccaactgtaggcattgaccctaaattgcgccaacaaatatggcaacaattcaagcaaatgaccaaagacggaaagagtgtcgtcatcacaacacatgttatggatgaggcggaacgttgcgataaagttggacttattgtcgacggaagaatatttgctatagatacgccaaccaatttaaaacaaagatttaatgtagatacaattgaagcggtatttattaaagctgaggaggttcgtcaatcatgaaaattttagctattgttagacgagtattaaaagaaatgttacgtgataaacgtacacttgcgctaatgtttctagcaccaattttaatattgacgcttatgtattttatttttaacggtgatgaaaacgatttaaaaatcggtatcgatacatctgtttcatcaaatataacaaaacaattgccatcatccgacataaaaactcaaacgttccattctcatgaaaatatcaaatctaaaatcgagaaaaatcatcttgatggttatatttaccaagaaaatcaaacattacatgtcatttacacaaatgaagatcctaacaaatctaatatgatcaaacaaatgattggcaaagctttacaacaagataaaataagcagtataaagcatctaattgaaaaagcacctccgaccatgaaagcaccaaacaaacaagatattaagatttcacattcctatttatacggtaattctgatagtacttatttcgataaaatgtttccaatactaatgggcttctttgtatttttatttgtatttctaatatcaggtatagctttattacgtgaacgtacaacaggtacgttagaacgtgtattatcaacttcaattcgtcgaagtgaaatcgtccttggttatctgattggctatggtatattcgcaatcattcaaacattaatcatagtcctattttcaatatatttattgaacattaatttagcaggtagcttatggtatgtaattttgattaatatttgtttagctattacagcattatctatgggaattttcatttcaacgtttgctaattctgagtttcaaatgattcaatttattccactagttgctgtacctcaggtattcttttcaggaattttcccacttgaaaatatgcctgattggctaggtaacattggctatatcttccccctcagatatgctggtgatgctttaaccaatgttatgattaaggggcaaggttggagtaatatatggttcgatttactaattctaatgatttttatcatggtctttattatcttaaatatagttggtttaaaacgatacagacaggtataaatactacaaaacttttaaatgacttcaatcaagataagcttctaaatataaagcactgataataaaaacaaccactaaaaaacggtaatgtctatcacatttaaaagacattaccgtttcgtttattatttaacttgtaaatacttagttacttcttcattaattttgtgatataaatcctcatgatctgttaagcgataaccaaatgacggcaccatttctttaatctttggttcccatcctttgaattcatcacgatagcatcgctgtaaaacatcaaacataatatctacagctgttgacgcaccaggtgatgcaccaagtaatgcagctaatgtgccatcatctgacgtaatgacttcggtaccaaattgtaagttacctttagaatcctcagtatccttgattacttggacacgttgccctgctgtaatcacttcccaatcttcatttttagcatttgggaaaaagactcttaaatcatccatacgctcatcattagataacatcaattgtgacactaaatacttcgtaagactcatttctttgatacctgcagataacatcgtcacgatattatttggtttaaccgatttaattaaatccatatgtgaacctgtttttaaaaatttaggtgagaaacctgcaaatggaccaaataacaatgaacgcttgccgtctacaaaacgtgtatctaagtgcggcactgacattggtggcgcacccactgctgcttttccgtacactttagcatgatgacgatcaatcacttcttgatttgtacagcgcaggaataatccacttaccgggaaaccaccaatatgttttgattgtttaattccagtcttttggagtaatggtaaactcgcaccgccagcaccaataaatacaaaatcagattcatatgttgtcgtttcgttagtttctaaatctttaactttaactagccatgctccaggtttctgtttcttgatgtctaatacattctgcttatattgaattcccacaccacgttgttctaaattatcaaatagctttgcagttaacgcaccaaaattaacatctgtaccagtttcatcataagttaaagcaattggttcatcagacttacgaccttcaatcattaacggtacccaagatttcatttcttcttcatcttgcgataatttcattttttcgaataaaacacttttctttaacgttgcaacacgactttttataaaagctacattatcttcgccaatgacaaaactcatgtgtggcaccgcttgaataaagcgatctgggttatctaattgtcctgttttaactaaatatgcccaaaactgctttgaaatttggtactgctcatttatcttaattgctttactacaatcaactgtgccatccttaccttcttttgtatagttcaactcgcataatgctgagtgacctgtaccagcattattccatacatttgaactctcttcgccaggttgcgataatttttcaaacacttttatgtttttctcaggtgataattctttcagtaatgttcctaatgttgcactcataataccgccaccaattaagatgacatctgttttgctatgttgtgttgtcataacaaatacagtccccctttttaaaatgaataatggaacgttcgacaaatacgacatattaataccactttgaatcaataagtgtctcaataggttcccatggtgatgctctattgctatctactatgtatattaatattttataataacgaaaccactttaattatatactttatgtgcgatagcacaaagacaaaaccataaaccttaacagctatcaaccaatttaacttgattgctgattactcactcttcattttaacataaagcgctaccattattataatgtcaaacttctttcattaatgatccattaaaaaagatgagatgttagaaaacatctcaccctctgtatatttatattttgaaatacgttaatttatagtaatgacaagatgaaagtccaaatacagatgaagatcagtaaacatacactgtatttcaatgtcatttttaataattctgattccttaccaacttgttttactgctgcagttgcaattgcaatagattgtggtgaaatcaattttgccgctacaccaccaactgtattagcagatacaagaagtgaaccacttgttccaatttgttgtgcaacagaagcttgaattggtgcaaataatgagttgttatttacaactgatcctgtcataaacacacctatccaacctaagattggtgatagaactgggaagacattacctgctttagcaataccttgacccattgccgcacttaaaccaccataagttgtgattttagaaattgctaagatgaaacaaattgtaagaactggtaaccataattctttaaatgtaacaccgaataatctacctgcatctttaaagttaacctttttagacattaaaattgtaataataatagttaataaaatagctgtacctgtttgtccaataatatttaaagtcaatactaatggtttatgcgtaacttcgctgactgttccaggtaagttgaatttaaatactaatgatgataaagcaccatttggtaagaataagtttttaaagaatggcgcactccaaatcattacaatgactgttaatacaatgaatggactccatgcatgtaatactgcttttgcagaatgtgcttttgcaggttcaatttcttcatctttattaacacgataaatgtgttttggttggaattttttagaaaatactgctaatgctaacattgttaataacggtggaataatatctgctaattcaggtccactgaatacagttaataatccttgagtaagtgtataagtgattgaaactactaaaattgctggtaatgtttctttaacacctctaaaaccatcaataataaagataagtaagaatggaataatgaaatttatgattgccaatgttaaagttgctgattgagaaacacctaatactgaaacatctccaggtaatttcaacgtttctacaacacctacagggataccaatcgcaccaaaagcaccagacgctgcatttgcaactaaacataacatcgctgcttttaatggattaaatcctaattgtgttaataaaagtgcacaaattgcaattggtacaccaaatcctgctgcaccttctaaaaatgcgttgaatgcaaatccaataagtaaaacttgaatacgttggtcttgtgaaatatttgtaatactatcttgaattgttaaaaattgtccagattcaacagtaattttgtataacaatactgccatcataacgatatagccaatcggaatgataccttggaagaaaccttcgactactgcaccagaagcgataccaactggcaatttgaaaaatggtattgcaatgagtaatgttacaacaagtgttgtaatggctgcataaatacctttcattttaaaaacagttaaacatagtaaaaacagtacaatcggtattgctgcaattaaagacgataataataaattatcaaatgggttaaacgtatttactaacataggctgactcttctttccataaagtagtagtgtaattgcttcattaaaatcatgctctggctatagcattttgttatcgataacattttacagaacagtgagattaatgtgatttttttcacaattaaaatataccattttttcagactattaacaatatcactttcctatttaattgttttatttttcattttaaatctgttcatcaaaatgaattgtacttaatgtaatgaagtaacttatactattcatgaattttacataagaccgtgctaaaataaggaagatactacgatgagaaatggaagttatagcaatgattaaacagataaatgtttctaatatgcaaaagtttgaatctcaattaatgaaagctcagtctgaaggttatacacatgtcgttccatatgccaatgagataatgatttatcaatctatgttagatgcggttcaattatatcctaagtctatcgtggttgattatactgtggatggacaatacaaaaatgattgtcactatttcggtcaatcatcgattaacattgccgattgggctcaaaacaataattattatcctaacctaatatatgcgattcaacagactcttgatttaatacattattactctgtagaaacgattttcgatttagctttattgacacttctgaaaggtgatttatcaatcgatggtcatgtcgtttttgattttaaagcccctttagcaacaagtgcttcaatatgggaaactattaaaactattgaagattttgatatgatgtctcagttttatttgaataaaatggcttatattgatcatcatcctataccttttcgcaacctttttatcgaggattcagaacaacttaattcgccagacaattggttgtattctaccaagtttatgctacctaaatggttatataaaatagcaaagcaacgtgctgataacaaacaattacaaaacttcggcttgtatacgaagcaaccaaacgttttaaaagatcacatcgtttttatcggtgatcatcatcaatatataggtaattcaaaatatttatttacttacttcgttaaacataacccaatgactgcctgttattttgttactgacgatcgtcgcggaccacatttcatatcacctaagtctgaaaaagctgacgaattaattaacagcgcacgcgtagttttagttgaaaatgatatacctgaaacgttacaaccaaacggtactttaattcaattacatcaaggcacaccaataatgcaattatttttagatagtaaagaacctattaaaaatatagaaacacctttttatcgtgctaaaaggtataatcgctggttgcaattcgattatgttatacattctgctgatgatattagccacttttatcaaacggcttttcctagtcaccaagcaaatgtattggcttatggtaatcctaaacaccaatacttactacaaaagcgtaacgaaagtactactcaacaacagtataagaaatcgtttaaaataaatgatcaaaaaccagttttattatacgcacctattggattagtgagtgcgcaacaattaccactatcagatgctttattcaaagcctatcatgttgtggttcagggggttgacgaagcgatgttaccagaagaggcgcttgttgcaccaaagtatcttagtgctcaagacttaattctaatgtctgatgtcgttatcactgattactcaaatataatatttgatgcgatggctatagacaaaacagtagcattatatactccaaatcacagtcaatatattgagtctcaaggtgttaacgaagatatttggcgtcatctatcaaaaatttggtatacagaccgacaattattaattaataatttaatttcccaggcaataccagtgattaaatatccacaaatacaacataaagaacaaccattagaatctatttcacaacttatattgtctaagatgacatctaatcaatagtgtttaaatccctcagtggctgtgaatgaggtttaaaagtactatagaacgtaaacctttttactttaaaatacgcaaaaaacggtaaaccctaattcatattatagagtttaccgttttaattttttaacttgcatcataattacattaacattattgttggtagtttggatcagtaaccattgcttgtccagtataatcaaccgttacaattgaatattttccatttacgtttgggtctttaaaactaaacacatacttatagttaccattatgttcttcaattgaataatcattataaactttatgaccattaccaaatttatttgcttcgttgttagctgcatttaaagctgtttggaaattaggcaattgttgtaatgcttgtgatttattaccattaaatggataaatttgacgagccactggcgctgcgttttgtccataatatggtgcaacgtaacttgatttttgattgttattcgcttgattattacttgattggttattatttgtttggttttggtcattgtttgttgcatttgaattagattgttgctggttatcgtttgcactattatctttattatctttgtttacgtctttactatcatctttattgtctttcttatctttagatgaatcatttgtttttttatcttgttgttcagttttcgctttatcatctttttctttattactgtctttttgttggtcactatcttgaccacatgcagctaaaaataatgataatgctagtaaccctgtaactaatcttttcatacatatctcctcctataattcgatattcattgaataagcttgaaatacatatctaccatgtgtatcatttcatggcttgttaccaaagacgtaaacattaatatgatttgaataatcacaatacccataactacaatctaaggttctttttattataccctaatttttgttcattattatttaatttttgtgaattttatgttttctataaatttaattattttactttaacacttcattacgcatttagcatttcaaggcatacacaatatttattactatgatttcattttatctgctgcaaaaacaatcattataactctttttccataattaaatctgtatccgttacatcacctgtttgaaaatgatgttcaccaaccactttaaatccatgacgtttataaaatgcttgagcacgaggattatgctcccaaactcctagccaaattttatgtttattatgttcttgtgcaattttttcggccaattctatcaattgtgaacctcttccgccaccttgaaagtctttcaaaaaatatatgcgctgcacttctaaataggtctcccccatttcttcagtttgagcactattaatattcatctttatataaccaacattcgcaccatcttcttgataaaaataatgaaatgaatctacatggttaatctcttgtgtaaatttttctacagtataattatctttaaaaaattgatcaaaatctttgtcatcatagtaagaaccaaacgtgtcataaaatgttctagttgctaattcaactaattcactagcatcttgttttgaaatttctttgattatcccagccatataaatcctccaataaacagtgatcgaatcaaaatattacttatgtatttttctgccaaaactatttaaaaatacattaacacaaatcaattacaaattgtattgattgtgtgtaacatcaataaatgatacatttattccagtaaaatggccgtatttttaaaagagaaaaagagaggatgtatcgttgtgacagaaacatttaaagcgtttgtaattgataaagatgagagcggtaaagtgacaccaactttcaaacaattatcgactactgatttacctaaaggagatgtgctgattaaagtacattactctggtataaattataaagatgctttagcgagtcaagatcataatgcagtcgtaaaatcgtatcctatgattccaggaatagatttagctggtacaattgttgaatccgaagcaccaggctttgaaaaaggagaacaagtaattgtaacgagttatgacctaggtgtcagccattatggcggttttagtgaatatgcgcgtgtaaaatcagaatggattatcaagcttcctgatactttaacattagaagaatcaatgatatatggcacagctggttatactgccggtttagcaattgaaagacttgaaaaagttggaatgaatattgaagatggtcctgtactcgttcgcggtgcttcaggtggtgtcggtactttagcagtactcatgcttaatgaacttggttataaagttatcgcaagtacaggtaaacaagatgttagcgatcaattacttgatcttggtgccaaagaagttatcgatcgacttcctgttgaagttgatcataaaaagccactcgcatcatcaacttggcaagcttgtgtagaccctgttggtggcgaaggtattaattatgttacaaagcgtttaaatcatagtggatcaattgcagttattggtatgactgccggtaatacttatactaattctgtattccctcacattttaagaggcgtaaacattttgggaattgactcagtatttactgctataaaattaagacagcgcgtttggcgtcgtctcgcaaaagatttaaagcctgaaaatttacatgagatcaagcaagttattacatttgatgaacttccagaacaacttaacaaagtaattaaacatgaaaataaaggccgcattgttatcgatttcggtgtagataaatagtattcgtgaaaaagacatcccgttatgcgagatgtcttttttaatttctttttgtttataaaatttctgatacttcatcaaatagcactttactttaatacattttagggaatcatgtattctccgcccctatcatacttgcaacactagtcaaatactgattagtgtgtctaaaaataaaatttaatttctctttctatatacatcaaaggcataaattacccaataaacgactgtgaatacacaactatacaaaataactctctcaatatttgttaaaaataaatagatcattaaagctgataacacaagtgcaacaaaataatatattatagcttgtcttaatgtatcgattttcattgttctaactcccttagttacaaagtcgaaacttctatatcatatcaacttgaactttaccataaaacacacatttttttaatatcattacttagaaaaacaaaaacatactaagttaagctgtgaagaaaactcagtatgtttatcggtacgatttttcatttttaaaacttaatatacataccgcctgaatctggttcggtaggcataaatccaaattttgcatacaatttatccgccgggtagtctgcgatcagacttacgtaggtgctttcgacagccacacttttaatatacttcataatatgttccataatttgactgccgtaaccttgaccttggtaacttttcaaaactgcaacatcaacaatttgaaaaacagttcctccatcgccaatcactctacccataccaattaaccgatctttatcatacaaggttactgtaaataaggcattaggtaatcctttttcagctgcttcgcgcgtctttggactcatacctgcattaatccttaatgcgcaataatcctcgcaagtcggaatatcatatgtcactttaaccattatttaccccacttttcatcacacaatatatcaacctagtataaatgtttatttacaatagtcttattcgcttctttaaacacttcatgatgacttgaaacataaccctctgcattcgcatctggttggatatatgttttagcaaggttcgctgcatttgcaccatcactaaatgcacttgcaattagatgtgattttgcatcatgataaacaatatctccacacgcatagataccaggtatacttgttgtcgtattaccaaatcctttaacacgacaatcatcatgcatatctagctttgaagatgtttcactcaataatgtattacaacgatcaaagccatgactaataatgacatcgtcaaatttaactgtatgcgtatcaccactttcaacatgttccaaaacaacttcacttatatgcgtttcatcatcattgccgaccaagtatttaatacgtgttttcgggcatagtttcacatttaaatctgtcaccagcgttttcatcgcttcatgaccacttacatcttcttttcgataaacaactgtcacgcttttagcaatcttggcaatatcatgcgcccaatctaatgctgtatttcctccacctgaaattaatacgtctttatctttgaaacgtctgtaactttgtacaacataatgtaaattagttaattgatatctctctacacctttaacatctaattgttttggattaataatacctgcaccaatagcaatgataactgctttcgatgtatatatttctcccgcttctgtttcaacttcgaaatgacgttctgcctttttcctaatatctaccacacgttcattcaaatgaacttccggtttaaaatataatccttgcttaattgtatcttttaaaatttcatgacaaggttttggcgcaatgccgccaatatcccaaataattttttcagggtaaattctcatcttaccccctaattcagattgaacatctattaatcttacagacatatctcgcaatccagcataaaagcttgcatacaaaccagacggaccgccaccaatgattgtaacgtctttcattatgtgcctcctatgactctctatattcatttctttcattaacgcgctcaaattgataattattatcatttaaagacattatactattaatatttatattgttaaaataaatcgcatagttagccatgaattatcaataactatcccatcacaatataaaaacacacctttcaaagtacgaaacaacaatgtccctttgaaagatgtgtatattttttagttctagttatattatttttttaaagactcatcacgtggttctttaagaattgcttgtcttaaaaggaaaaatagcaacaataaacctgcaagcatacctgtgtgcccaatacctgcaaagcctgcaaatgcttctggagagtatgatttaccagtgacttggaagaatccttttgtcaccatcatacctatagtaacgataacgcctatgttatatacatagaagaaccagttaaataagtagtaacttgataatttaaataacttctccaatggtaataatattaaaaacataaacatacctaaaataagtgtatgtgtgtgtacaagtgataattgtgttgtaccagtaaaatcatatgcttttgttagctctctatagaaaaagccactaaataaacctatgatcatataaaaaagaaatgaatataataacctacgcattttgaatcctccctcaccttttcattatatccgattatacctattataacagtgacaaaaaagcgaagatgtgacacaactgaatttggtttagcacacagtatgacagctaaaataactttacatcaagtgctatacaaataaaatagctataccatgacgctcgctacaaacgtcttgtatagctatagtcctatttattaaattatgacggcacttcagtacgttttgtgctatgttttctaacaatagctgaaactaaacttgatacagcgccaaaaatcataaaccctataaacatccacattgtactatttaattcaatatgatgattcaagtacaatagttctcttacacttgttgcatagtgtgtgaatggattccaatcatatacatatttttgataactttcaggcaacatttgtttaggtaacgttacaagttgcatactaaagaacattaaaatgaagaaaattggaattgacttcatacctagccataccataacacctaaaataaggcccacgaaaccaagaatcgcaagtgctacaaaaattgcgacacgatttggatggtcaaaatcaaatccttgaacgccttgcatgaaataaatataaacgaagctacctgcaaatgctgcaacaactgcaaatatcatttgtccaattgaagcaatgatacgatgttgcacgacgatattgttactagttctaaacgcaaagaacaataagatagacgttacgattgaacctatccaaattggcataaacattaggaatggtgcattaccacctgcttggtgatctttaactttattaagtttttcattatccactttcactggattcgtcaaaccattgatgtccgcggcattgactttaacattttgactcgttaatgtttccaaactttgcttcgtaatttgagcattaatattatcacccataccagttaacacagctgatgcaatttgtgaaccttgtaagcttgatccttcacttacaatcgttttaaatttagcctgcttaacctctacttgttgattccccattttttgtttcatttgttgaactacttgtggtggaatttcacctgaagcaactttttgttgcatttcttcttttttactatccataactactttttgtgttttactcatagcatcttttgaaaagtctttatcaataatagctactccaaagattttttgatctttcaaatctttttcaagatctttttcactatcaaccttaacccatttaattttattagaatcactatctaataatttatcctctaattttttaccaatgttaacatttttatcttgaatcgttgtacctttatcttcgtttaatataccaattggtaaatcttttggtttagggttatatgcaggataaaaagctaaagaaaaaattaccaagataatcatagttgctattggtgcaatccataataatttatttttaaatatattcattttattaattacctccttattagacaatgtgttgaatatttcgcatgttgtctattataatatgtaagtgggaataaacaatacacaatgttcatcaatacgtttattaatagacaaatacacccacattgttcaataacacaaggaggttgatttatttttgaaagaagataggcgaattagaaagacaaagtcctccattaaacaagcgttcactaaattactacaagaaaaagatttagaaaagattaccattcgcgacataacaacacgcgctgatatcaatagagggacattttacttacattacgaggataaatatatgttactcgcagatatggaagatgagtatatttcagaactaacgacatatactcaatttgatttgttacgcggttcttcaattgaagacattgcgaatacttttgtaaataatatactcaaaaatattttccagcatattcatgataatttagagttttatcatactattttacaattggaacgcacgagtcaattagaattgaaaatcaacgaacatattaaaaataatatgcaacgttatattagtatcaatcattctatcggaggcattccagagatgtatttttacagttacgtttccggagcaacaatttcaattattaaatactgggtaatggacaaacagcccatttcagttgatgaattagctaaacatgtgcataatattgtttttaatggtccattaagaataatggcagaaaaccgtttgcataaatcaaaccttgattcactaacttaagtaatactcgcttttcctaaatcctttagaaaggaactatatatcatgattacttcattcagacattctgaagatatagataaacatattataaaaacaccattagatcatacagcgtcatggattaatgtagtagaaccagaccgagaagaaattgaaaatcttatggaacaatataatatacctgaagactttatacgtgaccctttggactcagaagaaagttcccgtattgaatatgacgaagatactggttactcattaatcattattgatttacctatcgtcaattcaactaatcgtagcgttctatcttttgtaacgattccattaggcattattattggcaacggtattatcgtaacagtttgtgacgctgaaaatgaatttttagaaaatttacctaagcgtgatattaatttaaaatttcacagcagatttgcattagaaattttaactactattgccgaccattataatcgtaacttacgattacttaataaaagtagaattcgtattgagaaagaactaaaaaataacattactaacaaacaacttttcaaattaatggaagttgaaaaaagtttagtatactttttagctgccttaaaaggtaacgatacaattattaaaaaattattccgtttacctgcaattaaacgttttgaagaagatgaagaattactagaagatttaatcattgaaaataaccaagccatcgaaacaacagaattacatcaacgtatcttagaaagtatcacaacatcatacgcttccttattatctaatgatatgaatacgattatgaagacattaacacttttcacggtactattaacgttaccaacgctcgtatttagtttcttcggtatgaatgtgccgttgccaattgatgaccatagttatatatcttggattattgtggtaggtatttcattaattcttgtcgtaattgttagtattttcttatggcgaaaacagaaattataactaaattaaaaggtatgacagcttaaagtttcatcctattgcatttgcaatgactgatactttgattactgtcatacctatttttttattctacaacttttttatttgcttttcttttcgataaaattaaagtaactgttatggcaacgatgaatgatattgtcataccaacaaagtaatgtaaccatcctgcatgtactggattgattgagataaatccaggcaatccagcagttcctaatgcgattgctttaaccttgaagaaagcaatatatgctgaaccaatacctgatccaacgatagcgccaataaatggatatcttagttttaagttaacaccaaacatagccggttctgtaataccaagtaatgctgaaatacctgcggcagatgccacaccttttaacttcttattttgtttaataataaagaacgctgcaattgctgcaccaccttgtgcaacattagacattgtcgcaatcgggaatataaatgatccacccgttttagtggcatctgcaattaatgtcgtttctacagctataaagctatgatgcatacctgtaataacaattggagcatacaataatccgaatattaatccaccaattgcaccaccaaattcataaagccatgttaaaccatctgataaccagtaacctaattgtcgagtgattggacctacaaatgaaaatgttagaaatgctgttataaaaatagataacaatggtgttaacaaattatctaacaccgttggaataactttgcgtaaccctttttcaattgaggctaagatataagctgctacaagcataggtaacacttgtccttgataacctacttgattaatatgcaaaccaaatacatcccaatatggaatagccttacctgcttcaactgcttttgggaaatcgtatgcgctcattagcgatggatgaaccaatatcatacctaatgcagcacctaaaaacggattgccaccaaaacgttttgctgcactaaatccaattaaaattggtaataatgtaaatggtgcattcgcaaaaacatttatcatttcagctaatccagcaaattgactatatacatctatcaatgatttacctgaaaagaataaatctttcgcagtcaaaatgttatttaaccccattaataaaccaccagcaacgatggctggtataatcggaacaaagatatctgacagcatttttacaaatcgctgtaacggattcatatttttagcagattgtgctttgacttccgaagtggttgatgcttcttttccagttaatttttccagttcactaaatactttattgactgtaccagacccaataataatttggtattgtcccccagtagaaaatgtccctttaactacatccatattgtttagcgcctcttcatttactaaactttcatcatttaaaactaatcgtagtctcgttgcacaatgcgccattgcatctaaattctcttctccgcctatcgcgttcaaaatatcttctgcggattgcttataattcatatatttagcctcctaattagaaccggttccatttattccactttattgtaaccggttccaaaaatatttgcaacactctattatcattttatataaacaattacatcacttttgatagcgcattcatttttattgctatactacatgcatgtatattaacattaattatcggaggtaattttatgaaagaacgtggccatatcgaacagctttggcgtgaagaaaaatatcatgtattgttacacagtcaacagtcttaccaaatgataaggaatgctttaaaaaagaatttatcacttcatcaagtccaacaaatgattgatgatgctttgttaattgaaccgagtataggaagtgtatgtaatgcttttgatcatatgtggggatattttaaaaaatgtgcgaatgaagaagaaagacaacaatcaaaactacttaaagctgattttattaatggtaaaatcgacacccaaactttattagattttttagcagaacttgctaataaatatgatgttcaatatttactacaaagtcgtgttttaaacacaaaaagaaagagatagattgaaactttagttgtaacggacaaatagtagtcattggagttcagcaattcatactttgtactaaagtttactataatctatctctcaaggtttaaatgtacatatctatattaaaatgcgtttcatgatgttagaagataccatacacatttaattagttacagcataaatcaatttatacccttaattattacattgtttatattttaaattcgggggagtaattttaagtaatatcttgttgctgctaattctattgttaataaattgatattagatgtagaaattgagtgtgaaagttaataatagatgatttagctagtaacataattaattcatatatagtcaaaaagttctgttagatactgttcttgatgaatattctttgatgttaggtgttagctattctagatgagtttcttagatgtggatgcctgtcttgatgaagttatctatgatgttaatataatacttgatgttgattcttagatgttagtgcgatttcaagatgctgattctttgttgttgcactatcttggtgccgtttctagttgtttatagttatcgcatctcttgatgtaaaatctaagatgtttatgcatttctagatgttaattcttcgctgcttaagaattatcttgatggtaaatctagttgtgccatgcattttctcatgatgaatctaaggtgttaattcattgatgtgtgctgtttcttgttgcttcattatcttgatggtgaatttcgttgtctaatgtactttttcaaatgattattctaattgttacggcaataactagatggattttcttagatgttcacttttctagatgtttatacttatcttgatgttttctaaacagaacttttaaacgctttattttttagtagattgtttaaaatttcttagttgatggttattgttgttgatttgaataatttgtagcgaatattttgtaacagggctactaagaatttttataacaagaagtgatttcaatcgtactaattttcagcgtttgatgacaaaagtgtatgtccaaacttaaataatggcgataaaatttaagtcatgggtacatttaatgttttttgattcaaacttccattttggtcaatttgctttttttataacatagttgaatatcaataaaagattagcaagttagttcaaaatggctatgtattgttttatgaaatacataggtttgaaatctatattaattatgcaccaaataatttaattagactctatcgaaaatttccaaattttgcttgctatctttctaattttacatttatattgtgcacaatgcataaaaacaagcgttttcctaggagttttcattaatttcttttatttttcactattaccttttcaaaaatattcaactataataggtatactatccatgattttaaaaatttccatgttttacatttaaatgatagatttcaatatatattaggcaggagagagaaatatgacatgccaacttaaaatacatcatacattatcgacaataccaagtcgtaatattaataatattatggtgctattttcacttacaagtaaactcaatattacgattaatggtgaaaccaaagacgtaagtaattatattatcttaattaaccatggtgatatttataatattaaccacggcgaaaatataatcgaattaatgatacccgttttttatttttatcaacaagatgatgatttctttaatggttatttagatcgtcatttattacaatcaagtaattatattaagtcattaattgccgatttaatcagtacaccaacaagttcttctttaatgggtaaaaatataggtcaaagtattattgacactttacttaaagaagcttttataagaatagatcatgaatatttaccaaatattgctttaagcaatccggtgtttatagactgtgtaaactatattcatgacaatattgatgcgcacttgtctttaaaagatatagcgatgcattgcaacatctctgaatcatattgttctattctttttgttcgatatttgagtatgaattttaaagattattttacaagtattaaacttgttaacgccatcaatttattactttctacaaaacattctattacaactgtttctgaattggccggttttaacagtcatacaaattttgcaaatcaatttaagaattacttgcattttagtcctaaacagttccgttcactcgtttccaagattactgaaccaccacaaatacatttccaacaagataacgtatcacaattcactgagctaatttcaacaatcgatttaacagctcagctggctacaaatacaacagatattcatatagatgattttaatccaaaagatcgaagtcagcgtgccaaagtatttgttcgatttagtaatttcaatgaactatttcaatttattttcaatgaatattacgatattaactttgagcacttaccaaaacctgtcgttttcattgacgatattcacgatattgagattagccaaacgaattacaacctgttaaatagatgttttgaaaagctttttgaaaaaaatataggtttagcaatcgctattaaatcaacacaacaattcgaaacgatgaagcaattaatactaacatttttacaaggcaatcaagactataagacaagcaagaaattagttaaatttatgctcgtattttgctctaactctatgacagcagaagaaattcatttatgtcatcttaaaattaaaaacaaaaataaagaaattaaatatagtgtgacagtcgatggttttttagaaacttattcaaccgtggaacaagtttatgatgtcatgcagcgtcttaaattccattattactttattgatattgaaaattcaaaaactgcaacacatcttatcactaaaaaccaacactatcatcaaactgacactcattttgaacagtataagaaatttattttagattcaggtatatcatcaacacaatttgtatataataacctgtctgtaagcggatttaaatatactaatgatggtaagaatccaattcaattatctgacatagtgtatcacttaatcgcattattacgatatggcggtggcattagctatcaattattagatgaccattcaaattatatttccttgtacaacaaatatggtagccccctaccattaatgcatttatataaaatgtttagaccttttgttaatgaagacattgaaattacaaataattatgtattgagtcgtaaagataataactaccatttcttattattcaataaaattaatgaccgatatatgtcagacgtaaaacaagacttcattttccataatgaattacctcaagactctttgatgattattaaaacattgaatcatgaacatggttcaattcaacatttgcttccaacaagcgatcaacttgtctatatagaaaaagaaattctagatgaattagacaaaacgaattaccctaaaacggagcttgcagttcaagaagaaactggtcgtacatttgaactcaagttaaatcacgacgaggttaaatatatttgctttaaaccaagttaaatactaacagtcctcttgtgtttagtttcttacgttaaaggctatttatatcataaggagatgatatgtaatgagtaactcacaagcaattcaagtaattggaggcgtgctagagacgtcaaaagtcggcgtattatcaactgcatataataacaaacctaatagcagatatatggtcttttataatgatggtcttactttatatactaaaacgaatatccattctgctaaggtcaaagaaattaaagataatccagcagcatatgttttgttaggctataacgacacaactaaccgtagtttcgttgagatggaagcgacaatcgaaatcgttacagaacaagaagtgattgattggctatgggaaacacaagacaaaagctttttcagttcaaaagaagacccagagttatgtgttttaagagtaattccgcaatccattaagctaatgaatgataaatcattagaaacacctattaaaattgatttataatatgtaagtttttggctttaaaattatccagcaattgaacatgttagctataaatttcaacagtatcctatttatatatatttcgcttttgaaagcgtttaatacttttaactatatttttattatataacaatattttagacacattttattcacatttattgtgattaaggtgtgtctttttaaattaattttatgtaatataaatactgcatttgcaaactgttgtacttttaggtataacagaattaactacatttaaggagattgatgaaccgtgaaaaataaaaaaggttttggtcttggtattagtttaattgccatcatgttgattgtatgtattgtactagtaatcatgatgatgactggtggaaagaaagatacatattatggaattatgaaagacaatgctacaattgaaaaaatgattagtgaaaaagatgaaagcattgagaagaacgttaaattaccttcagatgcagacgtttcagttaaaaaaggtgattttgtaattgtttataaattagcagattctaataaaattgttaaagtaaaaaaagttgatcatgacgatgtaccacatggtttaatgatgaaaattcatgacatgggtaaaatgcacatgaaacactaattaagctttaattttgagtattatataagatattaaaagcagcagtaagatgttttctaattgaaaattatcttactgctgctttttaagaattaatgtgtcaatctatttccggttcgcctgcgctttgcgcatgcataaaagcccctaacaaccagaggtcccttcgcttcggttcgcctgcgctttagcgcatgtataaaagcccctaacaaccgaaggtaccttcgtttcggttcgcctgcgctttagcgcatgcataaaagcccctaacaaccaaaggtaccttcgtttcggttcgcctgcgctttagcgcatgcataaaagcccctaacaaccgaaggttgtaaggggctttaaatgtcagatagtattttttaaattgattttaaatattcttgaccttttgctttatcgtatacgttttcccatttagcaataacaattgttgataatgcgttaccaataacgtttacacatgtacgaaccatatctaaaatacggtcaacaccaataattaatgctaaaccttgtgccggtaagcccatggcacctaatgttgttaataaaacaacgattgaagttcctggtactgccgccatacctttagatgtaatcattaatgttaacatcaacacaatttgctctgataatgttaagtgcattccatacatctgtgcaacgaataatgctgcaatagattgataaagtgctgatccgtctaagttaaacgtatagccaatcggtataacaaaggatgtaatatcttttggtgaaccaaagttttccattttcttcatcattacaggaagaacagcttccgaacttgatgtagaaaatgctaaaagcaattcacttttcaagattctaataatattcatgatattaataccacacatccatgcaactagtcctagtatagcgaatacaaagaacaccattgcaaagacaacaactaatactaattttaatagtggtaataatgctgatgcaccaaatgtaataattgtagtacaaatgaatgcaaacactccaagtggtgctaattttaaaattttattaatcatccagaacacagcttcaagcgatccgcttaaaaattctttaactggttctgcttttttacctactgcagctaatcctaatccaaagaatactgcgaagaagataataggtaataattcacccttatttaaagcttcaaaaaagtttgtcggaataatatgtacaatggtatcaataaaatgatttccatatgtagattgttctgctgcatgtgcagttgattgatatttagaaatatcacctttaggtaattttgttgggtctaatccagcacctggtttaaataggttaccgaagataatccctaaacctattgcgattgttgtaataatttcaaagtataaaattgttttccagccataacgccctacagttttcgattccccaacgttcgaaatagaaagcgctagtgagcaaaatacaactggtataacgatcattttaattaaatttaaaaatacgtcaccaaatggtttaatgtaatttgctacgttttcttgtccatataataaaagtcctacgacaacacctaacactaatgcaataactacttgcataggtaggctaatttttctcttgaatagagccatagtacaaactccccttcatctgacatcactcaattatatcagaaaattgataattatctataaaaaattaaaatatttatcttttatagatgtcaaaaatcactaatttccatacaaaaactgtttaccttaaataattaaaattgcaggcactaaactgtttcaccagttatacgtttcactattttgatggtttataattctgattgaaatatttatgctttgcagttttcaaacttttcttagtctctgtatcaaagccttcaacaaataatcctttattagtactgattggttgcacaacataagttacaccaggttcatctttaaacgtaacttccttatagaagagaccttttttagcactatactctgttttttctgatttaattttatcttttagatttttctcttccaagtaactgtcaataagttgaatattcttatggccttgatatgttttcagaccaaagaaaaatgctacagcaacaattaatgaaataaataatataatgataactttaatcgcgttttttttcttcttcattatgtaactcctttttgcttatctattcagtatgaacgaatcaatttatttaataaagagtttttaccagattgtaacaattttttcttctcaatattattatagaaatcgaattacatacacgatgcttttaaaaaatttaataacaaatttcattttactatctatcaaaataattgactacttttaacaattaaggatgatacaattacatttttttcaatttaaaaaatcagtcatatcagtcattaccgatgaaaatactaagatattgatatgttttgcattatttaacatttaaattcaattatagacaattcgataattgcgatgaaatcagtacttgagaactattacacttcataatattgtttattttaacaaggaatgattggatgtatgtagaaaacagctatcttagcaaacagttgtgttttttattttatgtttcttcaaaagaaataattaaaaaatacacaaactatcttaaggattatgatttaacctatactggttacattgttttaatggcgattgaaaatgatgaaaaacttaacatcaaaaaattaggtgaacgtgtattcttagattctggaacactgacaccattactaaagaaattagaaaagaaagattacgttgttcgaacacgcgaagagaaagatgaaagaaacctacaaatttctctaacagaacaaggtaaagcaataaaaagtcctcttgctgaaatttctgttaaagtatttaatgaattcaacatttcagaacgagaagcatcagacattgttcataatttgcggaattttgtttcgaaaaatttcgacaattccgacaaaaagtaactccctatcataaggtgatgggcagaagtatgcatcgctatgtttattcattatctttattacttgtataaatctcgatgctcagttcttttgccctgattccttatcaggcacaaatctacccatttataacatttttatccccccttttactttatctttttttattctactcatataatgactttgtaatacaaatttatataatggaagtgatgatattgaacttcaatcaattcgagaatcaaaacttttttaacggtaatccaagtgatacatttaaagatttaggtaaacaagtatttaattactttgcaacaccttcatttgtaacgaatatatatgaaacagacgaattatattacttagaagctgagctagcaggtgcaaataaagaagacattagtatcgatttcaataataatgtgcttactattcaagctactagaagtgctaaatataaatccggaaaactcattttagatgagcgaaacttcgaatcattaatacgccaatttgattttgaagctgttgataagcaaaatattactgctagttttgaaaatgggctattaaccattaccctgcctaaaatcaaaccaagcaatgacactacttcatcaacatctattccaatttcttagttaaatttaaaatgaatacattactaaagccttaatgtcatgctactaacgttacacatggtattaaggctttgtcatttaaatttaagaatgcttcgtattacatatcaactgtgtttcaatgaaccatattctttttgatataaatggcgcattgtaaataatgcaatgcatccgaataccgctaagaaaataaatgctaaatggcttgaacctgttaaattagctacgtatgtgatgaccaacggtgggaagaatcctcctaaaccacccatcattgatacgataccatttgctgatcctgcttcatttgagaagtatgatggtactaatttaaaaattaagccgttaccaatacctgcacaaatacttattgttaaacaacctacagtaaataatgcgatatggtctgaaatacctaaaataacggcaccgataatcataataacaaaatcaatcatcagtactttaactgcattaaatttatcacctagtatacctcctattggtctcaagaatgttgccagcgcaatgaatacacctgaacgaataccagcatctactttgtcaattccaaaatgatttactaagtagttaggtaagaaaataccaaatgcaacaaaagcaccaaaagtaatgaaataccaataacttaagtaatataatttgtagtttttagataatgttttcatttgggccattaatggcactttaattttacgttcttgtgtgtcaccaaaaatgaacataattaatgcaaataaagcgataataattaagtaacttctaactgttgtttgccaaccaataatacccgctatcggtggtgctaaaaatgaagaaactgctgtaccgatattccccataccataaataccatttgctagacctactttttctttagggaaatatttaggaactgatgtaacaccaacagagaaaattgcgccacctacgccaaggaaaaatcctgatgccattaacatccccggcgtttgtgcttggctcaagaaaaatatcgggaataacaatacgataaaacttgtaaagaatacccatttagcaccaacaatatttgttaaataaccaaacggcacacggagcactgatcccaaaataactggtatcgctaaaatgattgatatttgaccttcagttacattgacatcctgtttaataaaaggcattaaaggagcaataatactccaagccataaatccaaccactaaacttaatgtttgtaatgtaagttgaaagccaccttttgttttgtacatacgtttcaccttcaccaaaatcattttttttaatagatatcaatactctgcctatatgttagaggtcaatgttatttaatcatgcattcatttatatgaaagcattcaatatagacaaagtattgactacatatatattttattatgattgtgaaaaagtgaacataaggattttcccttatttatggtgtaatttcccctatacaatgtccctttacgatgcatttagacactattttgtcatcattttaatcagattattaaggaacactcacatacttttcttaaaactttttcaattagttacaattactgcttgaaaatcacgttacgttaccctttattcttacaacgtaaggaggtttatcatgtataaaatcaatattattagatcagattcagtctataagaatatactcaaggcaccattaaaggaccgtgattcaattttcactaaagaaatattagtaccttttaaaaagaaatttgaggtgcaacagatgcctatttataatgatgccaaacagacaatgagtgcgattcaatttttaaatgcctttcaaattccacccaaagaactggttgaaactgaccaaatatcaatacaatacctgaataatgatttctggagtaattgcgaaaaacatttaaaagctgctatagatcaatttgcaaattatagtatctcatctcaagtttctaactatcatttcacagtattacttggagatagccaaaaaccacttatgtatctaaataaaaatcgcggtggtgatggtggcataccaggttatattatgatttatttagtgccgagtacaagtacaattaattctatgaaaagcttaattgcacatgaagtaaatcataatatgcgctatcaatatattgattgggatggcggaagtttgattgaattgattatcgcagaaggattagctgaaaactatgtagaatcattgtatggtaaagcgcatattggaccttgggtaacaaatactaattggagtcgtgataacgtaaaaattaaaaatactatttataatcatttacatttaaagcatatatttgaatcgatgccttttctctatggtgatgatattaataaacttcaaggtaggtctatcgttggcttatctcatgctgccgggtatgcatgtggctatcacttggtgaaatactttttacaaaaaacaaacatacctattgaagttgccacaacacttccagcacaaaaaataataaatgaggtgactgaattttggcatacacatacactttaaaagatattattgaaattacaggtgtaactaaacgaactttacattattacgatgaaataggattattagttccagataaaaatgataaaaattatcgcgtttataaacagcaagacttagaaaaattacaaaaaattttaatactcaagtcttttgattttgatatcgctaaaataaaacaatacatttcatatgataatgaacaaatgcgccagttattatcagagcaagtaagcaagttagataaaaagatttctgaattacaattaattagacgctctgtatgtgaatttattaaaggacactctctaatagataccagcattttaaacaagtcactacagacacagtatgataaagaagcatctataaagtatggtcatacgaaggcatatcaatcatttattaaccgtcaagataacttacaatcacaggatatcagacagaaattgacaacgatcttcaatcaattcaatcaaatgtctttgagtcactttcctttccaaaactgtaatgatatcgtggcagaatggaaatcttttatgaacacaatcgctgattttgatgatgaaacattatgctgtattgctaaaacatatgaaaatgatacgcgtttcaaagattactttaattcatatgataatcaaaatttagcatcatatatttcagaagctgttaattattttttgagcaatgagaataagaaagacaatttttaatcctcacatagagactaaaacactgaatacaccctaactaacatgtcatgtccaaaataaacaactactcatttattctctatatcaataactatattaaaagttattccgtttccaataaaataagtatggctttccaaaaggagaaagtattagctttcatacggttataaaaaaatatatttcgaaacatacaaaagcgccagaagattccccgtttcctctggcgctttgtatggtattaatttcaaactctaaaactctaataatttctttttcaatgcatattcaacgagctctggtttacttttcaagccaagctttgtcataatatgcgttttatgtgcctctactgtctttacagaaacaaataacttctctgcaatttctttattcccgtaacctttggcaataagtggcaatatttctagttctcgttttgataagattttaaaaggatctgatgtgtttgcagtgtcctgatttgaattagatacaaattcattcactaaagatgttgtaagtttcatatctacatatgtttcacctttatatacagttcgaatagctaacaataattgttcatcaggtgcatttttcaatatgtaacctttcgcaccattacgcaacacatggaacaaatactcctcatcatcaaacattgttaatattagtattttagtttcaggaaaactgtcagcaattttactcgtagcgataagacctgactcacctggtggcatacttaaatccattagtaacacatcaggtttatattccattactttttggtaagcttcgacgccatctgcagccgttgcaacaacttccatatcattttgataatttaaaatcatagagaaccccgtacggacaacagcgtgatcatcggcaatgactattttcaattttattcccccaatgtatgtttcaaattggaatgttcaatgtaacattggtaccctcaccaattttcgtttcaatattgacgctaccgctgactaactcagctcgctcattcattccatataaaccgagtccagaacctttaggcttagaacttggatcaaaaccatttcccgcatctatcacttctgctaccaaatggcgcccagtttgacggatacctacatttatttcatttacatcagcgtatttcaacgcatttaaaatagcttcttgtactactcggtaaacaaccgtttcaatatcactatcaaaacgggtatttttaatattggaagtatatatgattttaaccccataattttcttcaaattgtttaaaatatgatttaaacgctgcctcaaggcctaaatcatccaaagaggctggtcttaattccaccgacatattacgtatatcatcgattaatttagcgacaatgtattcaatattttctgcgtcttccaaaagctttgctgtatcttcttgatatttcaacaatcgcaattgaacatctacattgagcatttcttgaatcacactatcatgtaattccctagaaattcgttttcgctcattttcttgtgcggaaatcgttttacgcatcatacgttgttgatgcaatttttcttgttgttcaatttgtgatgagacattttgaagcgtaaatgcatgaatccctctatcctgatcaataagctgataagttgcagtaaacggcatcactttttgatctttcgtcttcataaacacttgaaaattcgtagcttgtacttgcatggactctaagaaacaatctttacatgattgtacatcataggcattcgtatacccttcacatctgtgacaaatcgcattcgctactgcactataattatcttcttcggataatatatctttagctgcatcattcatcgcaataattttaccactatcgtcggcaaatactattttttcgattgaatgttcatagtatttttttaataaagcttctaattgtatactgtcctcattaatcatgacctacaccctaattcatctcattatttatcatcattgaaaataccaaatttgcgttgaatatcatcgttatcaaatatttttggtaaaggacgtccatctctttgaccaaataatagtacaccatacacttgatttttgtaccaaagcggtacagctaagactgctgttaatgattcgcttaataaaattggatagtcaatcttttcttctggtcccaatgctaaaccgacattagctataatcatacgcttccctgttttcataacagttccagctaatccacggccttttcttaaaataattaatttaaaccgattatttttattacctgaaacatagtgccattttattggagatgatggtttgttagattcatagaaagcgattgccgcaaaatcataaccttcttctttgcgtattttatctaatgtctcttgaaatctacgatcttcaataattgcttctggtgtcaaatcctttcacctcttatacttacactttattcttacggtaaataatatatctgcgatttatatatgtcaaaggtacactccaaacatgcaccaaacgtgtaaatggccaacaagccataatagtgaaacctaacaatatatgcattttaaatgcaatcggcacaccactcatcaatgacgcatctggttttaacataaataattgtctaaaccaaattgataatgaagttctgtagttaaaatctggatgctgtacgtttgttactaatgttgcataacatcccataaatacaataagtaataataagaagttaacaaagatatcggacgctgaacttaatctgcgaatacttttcgtagtaacacgtctcgctgttaataaaaacatccctaccaatgtaattataccaaagatactccctatataaacagcaccaatatgatataaatgctcagacacaccggcagcatccatccacgacttaggtattaataatcctacaacatgtccaaaaaataccggaataatacctaagtgaaataataagcttccccacatcaacctttttctttctattagttcactagatttagccgtccaagaaaatttatcataacggtaacgtgcaatatgacctgcgacaaagacaactaaacataaatacggaaatataacccataaaaactgattaagcatgatgtttcactccttttggtgatgtcaaacataatttcaatgtttttctaagtgcttgaatcacataggcatatggattgttatcttcaccaagtgcattcgccatcacatacgttccatcctcaataatcataatgattaattgaatattctcttcagctcttggatcatttcgccattctgccacttgcaaaaattgaagcatcaacggtagataatcagaaagttcattatctaccatttctagtccaaacatttcatataatacctttaatttagctaacatttgcccacgttctttttgcgtatcaaatttgttatacgtcatatataatggtgcttttttcgtaaaatcaaatgtatctgtataaatcgctttgatttctgataatgaaaatgtcatcattacatttctaaatgctattaaatcgtcataccctggatgatccttcgaaattgtttcttcaaaagtctttggatgaaatgttaatttttccggaaagcatagctgttgcgctatatatccaaaactttcttgatactttttaaaattatcgaaattaatcacggaaaatccctccatagaaattctcattataaatttcttgaccagtttttcctgaacctactgcaacaccacaaccttcacagttatcaccaaagtgttcgccaccatagttatatcccgtactaccttgagcatgatacgtatctaaatatgtttccttatgtgacgttggaataacgaatcgatcctcatattttgctagtcctaataaacgatacatgtctttagtttggcgctccgttatacctaatcgctctaatcgagacgtgtcaaatggctgttgagtaacttgagatctcatataacttctcatcattgccatacgttgtagggctccttttactggttctgtatctcctgcagtgaaaatattagctaagtattcaattggtaaacgcatttcttcaatagccggaaaaatcgcatctggattttgagttgtatttttaccttcaaaatagctcataattgggctaagtggtgggcaataccaaaccatcggcatcgttctaaattcaggatgtaacggaaatgcaagtttatattcaattgctaacttataaattggagagttttgtgcagcttcaatccaatcgtaaccaataccatctttttcagcttgagcaatgacttcttcgtcaaatggatttaagaatatatctaattgtttttcgtataaatctttctcgtctactgctgaagccgcttcatgaactcgatctgcatcatataataaaacacctaagtaacgcatacgtcctgtacaagtttcagagcataccgtaggcatacccgcctcgattctcgggaaacagaatgtacacttttcagctttgttcgttttccaattgaagtaaactttcttatatggacaacctgtcatacagtaacgccatccacgacatgcgtcttggtcaactaatacaatgccatcttcatcacgtttatacatagcacctgaaggacatgaggcaacgcaacttggattcaagcaatgttcacataaacgtggtaaatacatcataaaagtttcgtcaaattggaatttaatatcttcttctattttttggatgttaggatcttttggacctgtaacatgaccacctgctaagtcatcttcccagttaggtccccattcaatttcaatgttatcccctgtaatttctgaatacgctctagcaactggcgaatgcttccctgatttcgcagttgttaaatgttcataattatagttccatggctcgtaataatctttaattagtggcatatccggattatagaaaattttacctaatgcaatctttgaaattctacttccagattttaattcaagtttccctttacgatttagtacccaaccacctttgtagtgttcttggtcttcccaacgtttcggataccctacacctggcttcgtttctacgttgttgaaccacatgtactcagcacctggacgatttgtccaagtgtttttacatgtcacactacacgtatggcatcctatgcatttatctaaatttaataccatcgcaacttgcgctttaatcttcaagccaattaacctccttcatctttctaactgctacatataaatccctttggttcccaattggtccataataattaaagtgataactaatttgtgcgtatcctccgactagttgtgttggtttcaaatggattctagtcggcgcgttgtgtgaaccaccacgtgtatctgtaatttctgacccaggcgtttgaatatgtttatcttgtgcatgatacataaacattgtacctttaggcatacgatgcgaaataactgctcttgccgttacaacaccattacggttatacacttctagccaatcattatcttggatatcgtgtttttcagcatcttcatttgatatccaaaccgttggaccacctctaaatagtgtcaacatatgcttattatcttgatacattgagtgtatattccattttccatgtggcgttaaataacgcagtaccaaagcatctgtaccacctttaattttcttatctctattaccaaataccattggtggcaatgtcggtttatatactggtaagctttccccaaattgttgaaaaacttcgtgatccacataataactttgacgtcctgttaatgttctaaaaggtactagacgttctatattcgttgtaaatggtgaatatcgtcgaccttgtttatttgaacctggaaatactgctgtcggtatgacttctcgcggttgtgaagttatatttaaaaacgaaattttctcagcagcgcgttccctagagatatcttttaacggcattccagtttgttcttcgagatcttcatatgatttttgcgataattttccgtttgtagcagatgaaatacttagtattgcatcagctacattacgcgctgtatcaatacgtggacgattcactctcacagaatcatcatttgtatcactccacgtacctaacatactttttaattcttcatattgttcactgacaccgaaacttacaccatgtgctccaactttccctttttcaagtacaggaccaagcgtgacatatttgtcgtaaattttagtgtagtcgcgttctacaattgcaaagttaggcattgtacgtccaggtaccgcttcaatttcacccttcgaccaatctttcactacgccgtatggtgttgaaatttcttgctttgtatcatgactaagtggagttgtcacaacatctttaaacgttccaggtaaatagtcttttgccatttctgaaaatgattttgccaatgttttataaatatcccagtctgaacgtgattcccataatggatcaatagcaggattgaaaggatgtacatatggatgcatatccgttgatgataaatcatgtttttcataccaagtcgctgccggcaaaacaatgtcagaatataacggtgttgccgtcattctgaagtctaaagagaccactaaatctaacttacctgttgtttcttcacgccacgtaatttcttctggcttttcatcttcatttggtgtagctaataatcctgattttgtgccaagtaaatgcttcataaagtattcttgaccttttgcagaacttgaaattaagtttgaacgccatataaataatgattttggatgattctttttcaaatcaggatcttctattgcaaattgtgtttgttttgatttcacttcatcaattgcgcgttgcaaaatcgcttcatttgaatctataccttcatctttagcttcttctgcaaacaacaagctatttttattaaattgtggatatgatggtaaccaaccaagtctagctgctaacacgttataatcagctggatgttgatgctttaactcctctgttttagctaatggagattttaaacgatctacatttgactcttcatatttccattggtctgtcgcaaaatagaaccaacttgttccgttttgcaaacgtggtggtccttgccagtctttcgcaaatgcgacagtactccatccttcaatcgggcgacatttttcttgtcccacatagtgagcccaaccgccaccattcacaccttgacagccacataacatcactaagtttaagattgaacgataaatcgtatctgagttgaaccaatggttaatacccgcacccatgataatcattgaacgcccttcagtatcgatagcgttttgagcaaattctttagctacttgaatgacaacactttgttttacgcctgaaatggcttcttgccaagcaggtgtatattttgattctgcatcgtcgtatccatttgattccaatttatgatcaaaacgacgcacgccatattgacttgccattaagtcaaaaattgtagcaatacggactttgtcaccatttgctaaagtgacttgtcgagttggaattgggcgattgaatatcccatctccatcactatcaaagtatgggaattgaattgtttctaattcatatccaccttctgtcattgataatgtagggttaattttagaaccatcttctgtttctagttttaagttccatttcttaccttcttcccaacgttgacccattgtgccattaggtaccactatactgtcactgattgtgtcgtagattaccggtttccattcactttgctctgtcgtttgtcctaagtcacttgctcttaaaaatcgacctgctttatatccattttcatcttcatctaacatgatgataaatggcatgtctgtatattgtttcgcataattaataaagcgttcattcggttgattaacataatgctcttgtaaaataacatgtgtcattgcttgagcaattgcagcatctgaaccaggattcggtgctaaccagttatcagcaaacttcacattttctgcataatcaggtgctactgaaataacttttgttcctttgtagcgaacttctgtcataaaatgtgcgtctggcgtacgcgttagtggtacattagacccccacataataatgtatgatgcgttataccagtcacttgattcaggtacgtctgtttgttctccccaaatttgtggagaggccggtggtaaatctgcataccagtcataaaaactaagcatttcaccaccaagtaaattgatgaatcgagcacctgctgcataactgatcatcgacattgctggaatcggtgtgaatccagcaattctgtcaggaccatattttttaattgtatatagtaattgtgctgcgataatatccgtaacatctttccaatttgaacgcacatgtccacccataccacgggcttgcttatattgtttggctttgtcttcattttcaacaatagacgcccatgcagcaacgcgattaccattgttttcttctaatgcttcagtccataaatcccagagttttccacgaatatatggatatttgattcgaagtgggctgtattcataccaagagaatgacgcacctcttggacatcctctcggttcatattcaggcatatccggaccacaacttggatagtcagtttgttgattttcccaggtaatcacaccatttttcacaaagactttccaagaacatgatccagtacagttaacaccatgtgttgttcttacttctttatcatgactccaacgttctctgtacattttttcccattctctacttttactttctaggatcgaccaattcccattaaatttttctgttggcttaaagaaattcaatccaaattttcccatatttatatcctcctacgtataaaaatacgatgtgtagatgtcgtgtttttaaatactttaaaatgcccaagactattgctttaattagattgtacattttttcacaatcgcagaatattagggaattacctaataaatataggaatttccctatcaataacgggatttcattgaaataatacacaatcatgtgtggtcatacttattgctaatctaaatcgttcaaatttggcacaacgacaaataaggcttcaacacgaatatattctctcggttgaaaccttacttattcatttattttttataaattagtgacataacactgtattagtatctgcacgatcggttgaaatatatgttacattttcttgttgcttaataaacgcatcatagtaatcatattgcgacgaatgatatgtgtcattcgatgtatcatttgggtttagcaagcatccataacctttgtcatatagtcgttcgcaaagcataagggcatcatgcttaacaccacttactacataaaattgctgatccggattagaagttgttgagacattttcagtataacccactacttcacctataatacatatacctggttttgcttcaattgcgtaatgctccaatttcccaacaatattacttaagcgccctttaacgacgaattcattaaaacaagatgcttgaaaaacaatcgttatcggataatcaatatctgtgtactgttgtatctgggcgataattttacctaaacgtttaactcccatatatatcgccaacgtaccaccatttactaaagcgttgacatctacttcattttcttctgaatctttaaaatgccccgtcgaaaatgtaacacttttagcaacagcacgcatcgttaatcctgtttgcatcgtagcaactgcagcactcgcagatgtcacaccaggtacaatttcaaacgcaatattaaagttgtttagtgtgtcaacttcttcttgaactcgtccaaatattgctgggtcgccacctttaagcctcacaaccttattatagcgacgtgctgcttccacgatacattcatttattttttcttgctgaatgtgttttgcatatggctttttaccaacatctataatctcagttgtcgacttcgaatattgtaaaatcaacggattcactaatcgatcatatagaataacatccgcttcacgtattaaacgctcagcctttttagttaaatagttaggattaccaggacccgcacctatcaagtaaaccttgccgtaaccatttacagacatatatatacgttcccgtctgtaacttctacctcatatacatctacacaaccttcatcaggttcttgtacaatcccagtatttaaatcaatcttttgatcatggagtggacagaatacatattcaccactcactgttccctctgacaatggaccttgtttatgcggacaaacattgtgaatcgcgtgaattgtaccactttcagttaaaaacaatcctatttctttgcctttgacaataacctttttaccaattaagggtgtcaattcatctaaagttgtcactttgattttctctttcgtttccatgtattacaccttctccacttcaaagatttttcgagcttgcgcattactagtgattgcttcccaaggttcagcttcgactgcttttttagcatccataatacgttcaaataattcattctgtctttctggatcaagcaacacttctttaacattttcaaaccctagtcttcttaaccacggtgctgttctttcagcataaatacctgtctcgcgataatattgcatcaaagcaccacataatttgattacttcatcttctgtttctacagttgttaaaaattcagctttttcaacttctgtaccaccattaccaccgatatagatttggaatccattttcaactgagataataccaaaatctttaacacctgattcaacacaacttcttgggcagcccgatacacccattttgaatttatgaggtgtatcgatgtattcaaatgttttttctaaacgaataccaagtcgtgtcgtatattgtgtaccaaatcgacaaaactctttaccaacacagcttttaactgagcgtgttttcttaccataagctgatgctgaacgcatacctaggtcttcccatatatttggtaattcttcttttttaactccatacaaaccaacacgttgcgaacctgtcactttaactagtggcacatgatatttcttagccacttctccgagacgaatcagttggtctgcatctgtaacacccccacgcatttgaggtataacagaaaatgtaccatcattttgaatattcgcatggtaacgttcgttagcaaatcttgattctctttcatcttcatgatcatgtggataaaccatattcaaataatagttaatcgcaggtcgacattttggacatccacctttgtttttaaagtttaaaacatgtcgaacttctttagatgtttttaaacctttcgctcgtatttgagtaacaatttgatcacgtgtcaaatcagtacaaccacatatacctgcaggtttagcagcaacaaagtcatcgcccaacgtatgctgtaagatttgagcgatttgcggtttacatttaccacatgaattacctgctttcgttttagccgtaacttcttcaactgtagtaaaaccattttccgtaattgcatttactatcgtgcctttatcgacaccattacagccacaaattgtttcatcatcagccatatcagcaattgatagcgatgcctcttctccacctttagtaagtaatgatacaagcgtataatcttctgttgattcaccctttttcatcatgttataaaagcgtgaaccatcatcgatatcaccatatagtactgcaccaactacattaccgtcttttaaaaatacttttttatagttattatcaacactattaaatatttcaatacctttgatttcagcattttcaacaatttgaccagcactatataggtcacaaccagaaacttttaatgatgtaaatgtagtggaacctttgtatccatctgtttctttattcgttaaataatctgccaatactttaccttgttcatataaaggtgcaactaaaccataaactttaccattatgttctgcacattcaccgacagcatatatgttattatcacttgtttgcatcacatcattgactacaatacctcgattaacttctaaacctgattcttttgcaacttcagtatacggtctgataccaaccgccatgacaactaagtctgctggaatttcacgtccatctgctaatttaacaccttcaacatcatcttctcctaagatttcagttgtgttggcttgcatttcaaacttcataccttgcttttctagatctgctttaagcatatttccagctttacggtctagctgcatttccatcaaccattcagctaaatgtaacaccgttacttccataccttgatctaataaaccacgtgcacactctaaacctagtaagcctccaccaattacaattgctttctttttagtcttagcaatgttcatcatttgttcagtatcatcaatcgttctccaaccaattacactcggtaatgtcgaacctggaactggaatgacgaatgctttagaacctgtcgcaaaaatcaatttatcgtatgatacttcaataccatttgcagtcgttacattttgatttgctctatccacgtcaactactggatcattggtaattaacttaatatcgtgtttctcataccactcatatggattcataattgtttcttcaactgtcattttattttgtaaaatatttgaaagcatgatgcggttatagtttggataaggttctttacctattaccgtaatatcatataaatcgttggcacgctctaatatttcttcgattgttcgaatgcccgccataccgttaccaatcattactagtttttgctttgccataaaatatgcccctttacttcataatatttatttcaaaaaggttttaaatttcgtttgtgcttttatattttcattggaatcattaagctttctaatctatctttaataatttgctttaaaattgggtcgaagttaattgaaggtgtgatgtgtatatctgtattaatagccatgtcactcatttgctgcttcactttgttaacaagtcttccgtcatataaaaataaaggtacgacaattaatttttgatactgtctcgcaatatcttctaaatcatgtataaaactaatttcaccatatagcgttctcgcataagtaggtttattaatctgcaaatgttgaacgcatgtctgtaactcttcatgtgcttttgtaaacttgccattaatattgccatgcgcaacaacgacaactccaacttgttgttcgtcacctgctaatgcgtcacaaatacgttgttcaattaatcgtctcattaaaggatgtgtgccaagtggctcgcttacttctacctttatgtctggataccgtcgtttcatttcatgaacgatattcggtatatccttgagataatgcatggcactaaagagaagcaaaggtacaaccttaagctgtttaacgccactttgaatcaacgttgtcattactgtttctaaatcctgatgctcactttctaaaaatgcaatatggtaatgatgtatgtcatcttttactaattcagatataaacgcttctaacgcttgattctgccgaccgcgcctcatgccatgtgcaacaatgatattcccattcacatttaccaaccctttcacacgtattgtataccaaatcatttcgtttttgtgaaaagaatcacattatagtgtaaaatcagggaattccctgatgcctgtagtcatgcatattccttatacattttccctttttgttaaatcaaaaaagcgaccatatatgaatccctactcaacatttatttgagcaagcatcaatatatcggtcgcttgtagtgtatattattatcttaaaatggtggttggcctaatattgtttcatcaaagcgctcgggtatcaatactttgcgcatgatcacacctaaatcgccatcatcattttcatgttcgctgtatatttcataacctcttttttcataaattttaagtaaccacggatgcaatcttgcagatgtacctaaagtaactgccgctgactttaacgtatctcgcaaaaatgcttcttcaacataagtaagtaattggctaccatagcctttcccttcatactcaggatttgtcgcaaaccaccagacaaaaggatagcccgaaatgcttttcacacttccccaaggatatctaaccgtaatcgtagatataatttcatcatcaatggtcatgacaaatgtagtatttttatctatattttctttaacagcatctaaattagcattaaccgaaggccaatcaatacctagttctctaagaggtgtgaatgcttcatgcattaattgatgtagcacttctgcatcattttcatttgcgagtcgaatcattgtttttgtcatattaatccccactttttttaaaatgatttaaccatattttgtttttaaaataaatatccatcaaagtgtaccaataaatttatcatatgtcagaaggtatgcttcagctgagtaaaccaatactcgcattaatcatattaaaattcactctcttaacgtaaaaaaaccattcaaattcatgaatggtttagaaggttgattcattgttacgctatttaatcactacatcttaattactgttgctctaaacgattacgcttaccatttaaaaatgcataaacaagtcctacaaaaataccgccacctacaaagttaccaaggaatgcaaaaacgatattttttaatacatgtaaccaagatacagcatcaaggttgaagaacaccatacctgcatataaaccagcattgaatacaacgtgctcatatcccatgtatacaaagactataacaccacaagcaatgaaaaatgcttttgtcaatccgcctttgaattgcatagaaataaaaataccgatattaataaagaagttacagaaaataccttttgtaaaaatattcaaccaagtcgaatcgactgtctttttctgaactaaggcagttaaggcttgtgtcatttctggtgtcataacatgtgcatatttcattaagaagaataatacaaaaccacctaaaatatttccaaggaaacaatataataaaatccacatcatcttattaagagaaacaactttataataccagccaactgtaaaatacataaaattacttgttaataattcagaattcgttagtacaaccaagaccaatcctaagctgaaagcaattgctcccattaaattaatgagaccatcaacatgtgtacttgcgaattgtgttttaataccaaacataaaaacagtaacaatggacaataagaaacctgccatcatagatttaagcatgtatcgtcctggtgtttgctgtaccatcacttgtttcatttgaacagatgatgatattgagtctacgattgctttagttgaatacgtatcttcaactgttttattattttttatcacagcacttcccccatttactattatcaaataaattttacctattaattatattagtatttagatgtaattcatagattaaaattcagaaaattctttttaccaattcaaaactaatatttactcataaaaatagcgagatagatatcgcgacataaaacaattggtatcattttaattgcgctcatctcgctttatgtaaagtattacttattcttttttaaatttgaaaagtaatgtaaaccatatgcaaatataccgtagcctacgactgtacgcaaaataaatctaacaactttatttggtacacatttcgaagtaacagtaattgaagataaaagcgttgtaaaaatatataatattaatactttaatgtaacgttgtgccatcgaatcacccttcattcaattaataatattacgttattattataaactgaatggcatataaaattttttacatattttcaacaactttatttcaataaagcatcaagttgatctaatgtttgattcatcccttgctcaacacccatgtttatgacttgttgagcggcttcttttgttggaaataccgatgttgatgtcactgtcgttttcgttgtattgctctcggaaaatgacaaagtaatcttcatgcttggcattttcgtatcttttgcaccttgaggtgtcgcaaatgagtcaatatattcaattaaatatggacgcttaaccgttttatattctgctaatgtatagctggtcattgtaggtgttttaatcgcgtaaaatgcatcaccgcctgaaacagcattaaagcgaaacactttggtactagcgtcttttggatgaaaccatttttcaaataatgcttttgtcgtataggcatcaaacaccttttcaatcggtgcttctatcgttcttgaaaaaataattttattatcttcaactttaatcgtcatcttcccactccctatcttttatatttactcatcttaacatgcattgagtaacatatgttaccaaatcatttgttataaactatagtaatattaatcattccctctgttgaaattgataactacgaaataaaaaacacactctattcagctattaacagttgagtagagtgtgcaaacctgttgaattaatgcgctaacatttcttctttgatttggtctttatttaattttgaaggataatatgttggccagttatccatttcttttaataacgcgtcattatcattacccataaagatatggaagtgttctgcctttttaggtgcaatgtagtgatcgctaaattggatgaatttcggtaagtctttatcattaccatcgaccaatttaaacataaatctcacgccacggttacctttaggatatttcaatgttttcttaccattgtattcatatttaccagtgtgtttcttaccatctttagtaaatgtaatttcatttccttttatatcaatgttagtaatatcagttttatatcctttgtcataataagcttttaaatctttagcagatttcttcggatcattttcagctttatgttccatcacttcatcaagcgtaccgtcttttaagtaagggtaaacagattgccattcaccagcataatcgcttaattcacggtctttaacttgctcatctttaaaatacccatcagaaattgctttgtcgtgtttactttcagctttatcgtctttcactttaacaccactgtctaaagctttaccgatattttcaatattcgatttcattaatgattgatacgtaatattatcttttttctgttgttctttatttaaagactccatgttgtagaattttaaaggcttcgcatctgtttctttacgaattgtttcagtcactttattcgcaacattatcttcataaagaatatattttgcattgctatctctaatttctttaacaattttagttaattctttttgtgatggatcttcagcattcatgttttgaatacctttttgaacaaaaccataacgatcagctaagtatccaattgattcatgtgaaatgaatactgcattaccttgcttatcttttgtaacttgcttcatatcgttatcaattttcttaagatcgtcgtttaattttttgtagtttttctcatagtcatctttatgttttggatctttcttcactaattcatctttaatttctttagcgaaagtttggttaattttaggatctaaccatacgtgtggatcatatccgccatgatgatgatgttcttctttctcatgatcatgtccctcatgttcatgctcttcaccatgttcgtgttgatcagttaaaagctttgctttatctaatttatcttctaaagacagttttttatctttatctttgatagtagatgcaactttcttagcaaccggatctaaattatcccctgtatacataaacaagtctgatttgcttgcacttaatatatctttttgtgttggttcatagctatgtaaatctgtccctgctggatagattgatgataccttcacgtgttttccaccaatttgctctgcaaatgattgcaatggataaactgtcgttttaattgttaccttgccatctttatcttttccatcatcattcccacatgcggctaatgataaagttacggctggtacaagaagtaacatacctaatttctttttcatagtcaccctcctaaatagtaatctttacgttttaaaattatatactcatgctacttaaaatacaagcactgtttttataaataatataaagtcgaatcatactttaggtatttaccacttttcgttttatctaatacatgactattgtacaaatatgatacagaaaactttatagtatttacgaacgtcgtaatataagaaaaaagacaatctctatcatattgctaatagaaattgcctttcatattgtcctaataaattggtatcacttacttatctcaacaattaagactatttgattttatcttttaataatttttcataactttcataatcatatggatcttcaactttctcgccattaataaatgcagttggtgtcgtttttatatgatgatcttcagctatttttttatctttctctgcagctttccaagacttgctatcttttgtcttgtaatcttttataattttattttccgtctctttatctaaatgcagttgtttaatatgtttatctaatagttcttttgttaaccattctttattttcatcttgttgggcagcaaataattgcttttgaaaatctaaaaatgatttaggtgcatacatcaatactgcgtgactcgcacgcgaaccaacaattgagtctttacctaagaaagctaaattgacaaattggtattccactttgtgattatctatataatttttacgcaactttggcatgactttttcatctaattctttacaataaggacatttatagtcgccatatatgacaactaatggtttgccgtttttcgaagatgtcgttgctgattcttttttaccgcaagctgttaaaattaacatgctcactataaataatgttagtaattttttagtcataataactcctgttcatatctagttcgtcatattttcttcatgataatccgcatcatgttgttgataatatcgtctcgaatcaaaatcttgcttatatgatacacgttcatcactaaaatcatatgcataataatgcacttcatcatcattactcaaaggtttataagctaaaatgataattttatccttatcatagacataaatattagcatctttgcgttcaaaatgatcaacacgatcaccgttgccttttttggcaagttgttcttgtttttgattttgaattttaactgcttcatctatttctttcacatatttatcattaccacatcctgatataaagactagtaataataataccgtcgccacaaatcgcttcaatgttcccactcctactatcaacttccaactaactttcaatataattaatactatacaccgtcaaacatcaatgcgctacaactactaccaatgcatttaatataaatatccaaagaaataacagttatgtatagtcaaagaaaaatatatttcattttctatgtgtatttgcaatcagtttttgataaaataaaaaaatagcattatatataaattcaaaaattacagttcaattcagagagggatgggataaaatgaactttgtaacgttgacttcggatgagttcaatgcgtttacaacaaagcatttttcacattacacacaatcagctattcattacaatcatagagttgatttaaaaggcgatgtgcatcttgtaggggttaaagatgacaatggccaagtgattgcaggatgcttattgacagaagcacgcacacttaaatttttcaaatatttttatactcatcgcgggccagtgatggattatacaaatcaatcattagtagcatttttctttaaagcattaacgtcatatttaaagaaacaaaattgtttatatgtccttatagatccatatttaattgaaaatttacgcaatgcagaaggtgaaattgttaagtcttatgacaaccgagcatttgttagaacaatggacacattaggctataagcatcaaggttttccagtcggttatgattcaatgagtcaaatccgttggttatctgtattagatttaaaggataaaacagaagaccagttattaaaagaaatggattatcaaacgagacgtaatattaaaaaaacatatgatattggtgtcaaaactaaaacgttaacgattgatgaaacgcaaacctttttcgacttattccatatggccgaagaaaagcatggtttcaaattccgtgagttaccatactttgaagaaatgcaaaagttatacgatgaccacgccatgttaaagttggcgtatattgatttaaacgagtatttaaaaacgttacaattaaagcaacagcaactaacagctgaactctcaggtgttgaagaggcattggaagaaagtcctaattcaaagaaaaataaaacgaaacgcacacagctagaacaacagctgaatagcaataagcgtaaaatcgataatacaatagaacaaattgaacaagatggtgcagtgttaaacttagcttctgctttgtttatctacaatgaacatgaagtttattacttatctagtggttcaaatcctaaatataatgcttatatgggtgcctaccatttgcagtgggaaatgattaagtttgctaaagcgcatcatattgatcgctataatttttatggcattactggtgatttttcagagtcagcagaagactatggcgtacaacaattcaaaaaaggatttaacgcacacgtagaagagtatatcggtgactttattaagcctatcaaacctatgctttacaaattacaaacatacttaaaacataaacgccgttaacagtttatgctgtaacatctagaatataacaaagaaccacgcatcatgtatatggcatcatcgccatattaaaacatgatacgtggttctatttgtttattcttcattaataacatttaaaaaacgttttagttcttcagtttttggattgttaaaaatctcttcaggagccccttgttctccaatcatgccttcatgaataaatacaatgttattagatacttctttagcaaaacgcatttcatgtgtcacaatgaccattgtcatgccttcattagccaaatctttaataacctttaacacatcattcacaagttcaggatcaagtgcagatgttggttcatcaaacaacatcactttaggattcattgctagtgctcttgcaatagcaacacgttgttgttgaccacctgataatgcatgtggacgttgatctttgacatgtgttaaaccaactttctcaagtaactcaagtgatttcccacgcgcctcatcctttttcaactttttaactgtgataagaccttccattacattttctaatgccgtcttatgcggaaaaaggttataactttgaaataccataccagactgtttacgaacttctatttgtgattttttatctttagatgtgtatgttttgccgttaacataaactgtaccttcagttggaatttctaacgcattaatcattcgtaacaacgttgttttacctgacccagatcggccaattaaggttacaacctcacctttgccaacagataaatcaatacctttgatgacttcaacatcattaaatgatttatggatattgttcaattgaatcatgagcgataccctctttcaatataagattcgtagataccttggattattgaaataataaagcataccacccagtacattagcgcaactaacacataaattgttaaatattcatatgttgtagacgcaacttcttgagcttttctaaacatttcagccactaaaataaatcctaataatgatgtatctttgattaaacttaaaaatgtattacctagtgcaggaatcgatactcgaattgcctgcggtaagatgatgcgttgtatcgtttgacgatatgtcataccaatagaatatgcagcttccgtttgtccttttggtatagaaataataccgccgcgaataatttctgaagcatatgcacctacatttaatgacaagccaataatggcagcgaccacaggcgccaatgtccattgattatctgcatcattggttaataatctacctaattctggaataccataaaagatgataaataattgtactatcataggtgtcccacgaataatagatacatagacacgtgcaatacttcttaaaactttactcgttgaaatgcgcatcaatgctgtaaataatgcaatgattaaccctaatacaaatgttacgagggtaattggaattgaatatttcaccaaaccttcgagcataggcccaaaagcttgttttgcagcatcaagtgcatgtagttgttcactatttagatttagaaacatcttgaccaaaccatttcttacctattttagctaattcaccgttttcctcgatttttttcaagccatcattgaatttttgaactgtttcgtcatccacttttttagaaaatgcaaatgcagatttactttgttcagcgttacctttgattgccttgatcttagcattaggtttttgttttttataatccaagtatgacagactatcattaaatgtaccatcaacacgcttagacaataataaatccattgattggttaaagccatcaacttttgtaatatcagcacctttatccttagctaatttaccataattagatgtgaatgtttgtgctaacttcttacctttaacatcatcaaaatctttaatatctttttcattttcacgaataactaaaacagcactcgagaatgtgtaaggcttagaaaatttatatttcttttctctatcaggattaatacccacttagttcgcgattacatcaaaacgccctgcgtctaaacctgcaaacatagagtcccaagaagtttcgttaaatttaagttttaatccttctgctttagccactgctttaataacatcgatatcataaccagttaacttaccatctttatcatggaaactaaatggtgcataagtcccctcagtaccaacattaattgtcttgctatctttactagcttccttgtctttagacgaattgttcccacatgcagctaatatgaaaacgaaagctatcaccacaaataaaagtcttttcatagaatatatctccttattcttattgttctaatcggaataaaaatattttaatctgaatcgccagataagtcaatatgttgaacttttgctaaaaagcgttatatagctagcaacttatatttattgatgtgaatcaacttcttttttctttccttgtaacataaatgaacaaaagaaactaatcactgtaatcaataatgcaaataaaaatccagcgtgataaccatgtaacatcgtatcaattttaatttgattcatcatctcaattttgttcatgccattatagtctgacatagttggagaaaagtttttacttgcatgagataaaatagtaattaatgcagctgttccgatagaaccagcaatttgttgtactgtgtttgtcatagatgaaccgtgtgcattcatttcaggttttaattgattcattgtatgcgtcataacaggaattaaacctaaggcgataccaaccattcgaatcgcataaaccgttgccaacatgattgttgatgtttgttcatccattacaacaaaataagccgtagtaataacaacaatcgccatacctactaaagcaagctttctaggaccaaacttttcatataaagcacccgaagtcatcgacataaatgccataacaattgctcctggtaataaagttaacccagaatctaaagctgaacgatgcaataaattttgcacaaaaattggtaaaatcgtttccgaaccaatcatcgataccattgtgacacccataataatgataccaactgtaaattgtttatttttaaatactgcaaaatttaataatggtgttgatagccgatattgacgtaatacaaataatgcgactaaaacaataccaccaatcatagatactaatacgataggattatcaaaacctttttcagaaattgaactcgttccatacaataacccgccgaaacctagtacagaaaaaatgacagaaataaaatcaataggtactttaattgtagttccaacattttttatcgttttaaatccaattaaaaatgtcacagctgcaattggagcgacaacatggaaaagcgatctccagttaaaatattcaacaaggtaacctgaaagtgtaggtccaatagctggtgctaaaccaattaccaaaccaaatattcccatatatttaccgcgttcatgcggttggaaaacatccaaaatcgttgtcatcatcaatggcatcataatacctgcacctaacgcctgaataattctagcaactaataatgttgcaaagtgcggactcaaaccgccgagtaatgtacctaagaaaaagatagaaatacccactaaaaacacttgtcttgttgtataacgttgtataacaagcgcggacaaaggaataacaatcccattagtcaataaaaaagctgttgtcagccattgaacttgtgtatatgaaatttcaaaatctttcataatacttggtaaagccgtcactaatagtgtttcatttaataatccaaaaaatccacccatcagcatagtaataatcatcgttaatttttgtttcttcgacatttaaagcttccccctcaccatctaaaaaacgacacacatttttagatatccggtaattatacccattttcaaaaaaattagcacgactttattacaatttctttaaaacgtaatcattactatttacatatgagtagttatcagtcataatatatttacaaggagggatagagatgaaattagatttacagactgctcgtcgtaatttaaatagccctaacattaaaacaagaaagcgtgctttaaagattattaagcaacacaaaagagcgaaataattgttttaatttgactatattgtatgtctaactatattttcgagtatccctagctcgttaatataagctctatacttaactatttccttacattacttcacatatttaagagctgcatatacactcactccttgtgtatatgcagctctttttttataagtagtatttatctataacttctaaatcatccgttaattcataaacaagcggtgcacctgttttaatttcataattaatgatatcttcatctgacacatcttcaagatatttaatcaatgcgcgaattgaatttccgtgtgcagaaactaataccgtttgaccatctagcaaatattgtgaaatatgatctgtccaaaatggtatcactcgaactaaagtatctttcagactttcggaataaggcatcatacgtttatctaaatgattatatcgacgatcagctaagtaagcttcacgttgttcttcggtttcagcaggtggtttcacatcataagaacgacgccaaatatgtacttgttcttctccaaattcttttctagcatcatctttatttaagccttgcaatccaccatagtggcgttcatttaaacgccagcttttatatactggaatccattgttgtttagattcagttaaaatataatgcgttgtatctaaagcacgtgttaataacgatgtaaaagctacatcgatggcaatgttattttctcttactttttcacctgctctagtcgcttcattaataccttgttcagataaattaacatcttcccatccagtaaataagtttttagcattccactcgctttgtccatgacgacataaaattaattttggcataacttataacctctttcctttaatctttaggacgttatttcagggatattttaagatgatttaatcttagcaattttcttttcaatatgttttaaaattcaatgattaaatcaattatcactagacattaaatacataaatcctattccccattttcattttttaattcataaatgaatcaataaccacctaataacaaatcatattatacacctttgtccgtcatttttctaaggtttaaaaaatatttttaggtgcacctaaaaataaatgtaataaaaacgcctcctcagatatttatatatctatgaagacgtttaaatacattatagatggtctggttctgggtgaacatatactgaggaaataccttttttgtgcaaatgatgttcgacattgtcacaaatttgatgcgcttctactaaggaaaggttagcatctacaacaattgtgacatcaataaacacactacttccatggtaacggcctttaatacttttaacttcttgtacttcatcaacttctaaaatatcatttcgatacgcttctaattcagtttcattgaaaccatcactcaacataaaaattgcttctttaaaaataccaaaaccagtataaacgattagtaagcctagcaatgttgctaaaataatatcgacaattgggaaaccgatttgcgtaaaaattaatcctatcgccgttccaatgctgactaaactatctgataaattatctttggcagcagaatttaaagaactacttttcgttcttttcgctagtctttgattgactgcaaatacaatcaacattacaaggccactgattaagctgacgataattgttatttcgttaggtacaacgtcatcttctttgaacaaacgaggtgcattttgaataactacttggatacctacaaacataatgacaaatgacaccaataatgaagaaatattttcagacttcaaatggccataaggatgatttcgatcggcaggtttaattgaaattttcaatccaataataacagctaaagaaacgataatatccgtcatattgtttaatgcgtcggctcttacagctgcagagttaaagacaaaacccgtgacatacttaacaatagataagattatatatacaattaaactcaaataagcaccgcgttgcgccaatttaagattttcattatgagacatgcgttgaaccaccttgaattagtatagtaacaacattatgaatgatttattttaaatttacaacgtttttattttttataaatttttataaaattaaactaatttattcattcgcaacccctaaaaatattttttagcctttcttcaaatttatttgttagaaaggcttatgcagttgacgttttacgtccaactgcgttcctccgtcttcttcaaatttatttgttagaaaggtgcccaacccttcctgcttgttaactttcgtctcgaaagtttctatgttgggaccctatgcatgagttgcgaagctatctaatgtcgtgacctaattatatagaagaaaaagtgcctcagtgacaaatcaaatgagatttctactctaccaaactctcttcgaaagacaattttctcctctatttattagcaaactattgcatttctccatatagtactttcttacttaaaatacgctgaatgttctgaattaaacgcttttttacatagttaacactagttaatctattagttaacattagttaataattagttaatttccatttgtattctcatgtgataaattctaaaagcatacaataaatttaatatgtaaaaagaaagggaatacacatgaaaaataaatatatctcgaagttgctagttggggcagcaacaattactttagctacaatgatttcaaatggggaagcaaaagcgagtgaaaacacgcaacaatcttcaactaagcaccaaacaactcaaaacaactatgtaacagatcaacaaaaagctttttatcaagtattacacctaaaaggtatcacagaagaacaacgtaaccaatacatcaaaacattgcgtgaacacccagaacgtgctcaagaagtattctctgaatcactaaaagacagtaagaaccctgatcgtcgtgttgcacaacaaaacgctttttacaatgttcttaaaaatgataacttaactgaacaagaaaaaaataattacattgcacaaattaaagaaaaccctgatagaagccaacaagtttgggtagaatcagtacaatcttctaaagctaaagaacgtcaaaatattgaaaatgcggataaagcaattaaagatttccaagataacaaagcaccacacgataaatcagcagcatatgaagctaactcaaaattacctaaagatttacgtgataaaaataaccgctttgtagaaaaagtttcaattgaaaaagcaatcgttcgtcatgatgagcgtgtgaaatcagcaaatgatgcaatctcaaaattaaatgaaaaagattcaattgaaaacagacgtttagcacaacgtgaagttaacaaagcacctatggatgtaaaagagcacttacagaaacaactagacgcattagtagctcaaaaagatgctgaaaagaaagtggcgccaaaagttgaggctcctcaaattcaatcaccacaaattgaaaaacctaaagcagaatcaccgaaagttgaagtccctcaaattcaatcaccaaaagttgaggttcctcaatctaaattattaggttactaccaatcattaaaagattcatttaactatggttacaagtatttaacagatacttataaaagctataaagaaaaatatgatacagcaaagtactactataataaatattaccaatataaaggtttgattgataaaacagttttaacaactatcggtagtggctatggttcatacattaaacctcttgaagtaagcaaagaaagcgggaatttagctaaatcatatgcacaagtaagaaactatgtaactgagtcaatcaacactggtaaagtgttatacgcattttaccaaaaaccagaattagtaaaaacagcaattaaagctcaagaaacagcaacaactttcaaaaacgctttaacaggcatattcaaatcattctggaaataatctatcaaaaatatcttctctagttttacatcattttttaaataattttcgtaataaaccgtgattaaaaagaaccgttgattctcaatcgaatctgcggttcttttttcattttccatcaattaaatgtttcttcgctatttgtcagctcacttttttacctgcaacttgttaaataatccttacatcgttaacgaatagttcatcatttagttgaatcagctcaactttattaacttcaaattttcacaaactattgcgtagttcattcctcttccacttcaagcaccttaattaaacaacaattcaatagaataagacttgcaaaacatagttatgtcgctatataaacgcctgcaatcaataaatcttttaaacataacttaatgtaaaaacatcctttaacaatactaaaaatgtctcttcaatacatgttgatagtaattaacttttaacgaatagttaattcgaaaacgcttacaaatagattattatatatatgaacttaaaattaaatagaaagaaagtgatttctatgattaaaaataaaatattaacagcaactttagcagttggtttaatcgcccctttagccaatccatttatagaaatttctaaagcagaaaataagatagaagatatcggccaaggtgcagaaatcatcaaaagaacacaagacattactagcaaacgattagctataactcaaaacattcaatttgattttgtaaaagataaaaaatataacaaagatgccctagttgttaagatgcaaggcttcatcagctctagaacaacatattcagacttaaaaaaatatccatatattaaaagaatgatatggccatttcaatataatatcagtttgaaaacgaaagactctaatgttgatttaatcaattatcttcctaaaaataaaattgattcagcagatgttagtcagaaattaggctataatatcggtggaaacttccaatcagcgccatcaatcggaggcagtggctcattcaactactctaaaacaattagttataatcaaaaaaactatgttactgaagtagaaagtcagaactctaaaggtgttaaatggggagtgaaagcaaattcattcgttacaccgaatggtcaagtatctgcatatgatcaatacttatttgcacaagacccaactggtccagcagcaagagactatttcgtcccagataatcaactacctcctttaattcaaagtggctttaatccatcatttattacaacattgtcacacgaaaaaggtaaaggtgataaaagcgagtttgaaatcacttacggcagaaacatggatgctacatatgcatacgtgacaagacatcgtttagccgttgatagaaaacatgatgcttttaaaaaccgaaacgttacagttaaatatgaagtgaactggaaaacacatgaagtaaaaattaaaagcatcacacctaagtaaacagttcaatcattttataaaatcctgggacacttcatacttgtctcaggattttttaacatattgaatcagcctcataacattaaattattttatcgtacattaaatttaataataacaactgatttttataagaacaaagtatcgcaccataatagataaacaaataatacaaatgaagcaatttaacttgaaagcttaaataaatattctcaagttaataaataattaacttttagatggattcatcaaaaatcgcaaaaaagaacaatttgcattttacaaacattaattaaaaataaaagcaagacattcgtgcaatcggttgccttaaaatgtttacaactgtcaacaataccaaggttttattaactatatttctcacaaaattagcttttagcattccaaacaaaaaaggttaaatcgaacggaattatggcatttttaacttaattgcaaaaaaagttgataatggtcaattgttaatgaacagttaattataataacgttcaaaatatattattatttaattaagttaaataaaattatagaaagaaagtgaaacttatgcttaaaaataaaatattagctacaactttatctgtgagcttacttgcccctcttgccaatccgttattagaaaaagctaaagctgccaatgatactgaagacatcggtaaaggaaacgatgtagaaattatcaaacggacagaagataaaacaagtaataaatggggcgtgactcaaaatatccaattcgactttgtgaaggataaaaaatataacaaagatgctttgatcttaaagatgcaaggattcattagctctcgaacaacatattataactataaaaatacaaatcatattaaatctatgcgttggcccttccaatataatattgggttaaaaacaaatgatccaaatgtttctttaatcaattatttaccgaaaaataaaattgaatctacaaatgtgagtcaaacattaggatacaacatcggcggtaatttccaatcagccccatcactcggtggtaatggatcctttaactactcaaaatcgattagctatacacaacaaaattatgttagtgaagtggaacaacaaaactcaaaaagtgttttatggggtgtcaaagcgaattcatttgtcactgcatcaggtcaaaagtcagcatttgatagcgatttattcgtaggatacaaaccacatagcaaagatccaagagattattttgttccagacagcgaattaccacctctagtgcaaagtggttttaacccttcatttatcgcaacagtatctcatgaaaaaggttcaggcgacacgagcgaatttgaaatcacttatggaagaaatatggatgtcactcatgccattaaaagatcaacacattatggcaacagttatttagatggtcacagaatccataatgcatttaaaaatagaaactacactgtgaaatatgaagtcaattggaagactcacgaaatcaaagtgaaaggacagaattgatatgaacatgaataaattagtcaaatcatccgttgctacgtctatggcattattattactttctaatactgcaaatgctgaaggcaaaatcacaccagttagcgtcaaaaaagtagatgataaagttactttatacaaaactacagctacagcagattcagataaattcaaaatttcacagattttaacattcaatttcatcaaagataaaagttatgataaagatactttagtgcttaaagctgcaggtaatattaactcaggttatgaaagaccaaatcctaaagactacgacttttcaaaaatatattggggtgcaaaatacaatgtgtctatcagttcacaatctaatgattcggttaacgtagtagactatgcacctaaaaatcaaaatgaagaatttcaagttcaaaacactttaggctatacattcggtggtgacattagtatctctaatggtttatctggcggacttaacggaaacactgctttttctgaaacaatcaattacaaacaagaaagttacagaacaactttaagtcgcaacacaaattataaaaatgtcggttggggtgtagaagcacataaaattatgaataatggttgggggccttatggacgagatagcttccacccaacatatggtaatgaactcttcttagctggcagacaaagcagtgcatacgctggccaaaacttcatagcgcaacaccaaatgccattactatcaagaagcaactttaatccagaatttttaagcgtgctatcacacagacaagatggcgctaaaaaatctaaaattacagtaacttatcaacgtgaaatggacttataccaaattcgttggaatggcttctactgggcaggcgcgaattataaaaactacaaaacaagaacattcaaatcaacatatgaaatcgattgggaaaatcacaaagtgaaattgttagatacaaaagaaactgaaatcaataaataggtacaaaaacacggtcgcccacactaattgtgacgaccgtgttttaattttgttaaattcaccttagtaagactgccattctttttctcaatgtgagatataaaggaatagctacaattaaagtgaatattacgcctggaatcgcgtttaataacacgacccacacaggtaaatttaaaatgaccgatagtatcaaccttgataccaagctgcctaatacacttgctaaaactaatgatagtacatttattttcaataaataaacaactgcaatagctataactctaaatataatagaaataatcacattaattggattaaatacgccaaatatcagcaataatacgcttgataaaagcccacctaaaaagtactttttaattccaaagaaagctaatattaataatgctgccggtgcagataattgaaaatctaatcctggtataatggatggtattttcaaaactgccaaaatggttaaaatcgcagcaatgacactaatttgagtaatatcttttgatgtcatactaaaacccctataccgtttcataaacaacttgcttcggtgtgctttctaaaaatgatatgtaatgatttaaatcaatacgatcgtccacaaatattattctgcctccatatctcgtattaactggtttaatatcaaataatcgatggtaaccaattttagcagaggcaaaataacctgtcgtatacgttaagtcatcggacacgcaaagttctcctttgacatacggatgcgcattgatacaactagcaattgctaaggcatcagtcactctttcattaagatcacctttattatttatatcttcaaacgaaaaatgtgttgccctaatccccctttgtccaaatgaatctaaacgtttaccagatatagcagatagaataatagctcctgtataaaccgtttcatttttaatatatgtcatcccttgatttagcgcttgttcagtgacaccacattcttgtgttaaattttggagatttgctttatcatcctcaataatttgtaatgcttttatttgttgaatcggttccatgattttttgtatttttatattgagaaaatctggttgcccattttcatgaaaaaaacctttattataaaacctttgtaccgtctgttctattttgtcaaactcacaaatcgtttcagcaccactaatatgaacatcttgattgctagaacgcatttttatactatacatgacgatcacctcaatcttcttgatgcaaaatttcaaacaacctatctatatcttgttcagtatgaaaatatgacaatgatattcttaacattggcttagtcacagttggataccttaaataacttgtaaacacatgatgctttaataatatttgatgaatgttctcagccgcttctatgtcatcaaactcaataaacttaatcggcgagtttgaactattataattaacattgagtgattttaacttttggttaaaatatttactcaaactatttaatttagtgcgtctatcatcagcatttattaacttttcaatatttctttttataaaatacaaattataaattggcaaactacttgagtagataagtggtctaccgtgattaattaacatatccttcacatcatttgaacttaaaatcacacccccgtatgcaccacatgctttagacaaactagaagtgagtatatctacgccttgataattcgagtaattctctattccaaaactatgtgaaacatcgagtatcagtgttgcgttatatttatgttttaatgagactaattgaccaatatccacaacgtcgccattcgttgaaaatacactatcagatatgattattttttgtatattttgattagggcattccgctaaccttttttctaaatcagcaatatctaaatgcttatatatcactttttctaaaccacttaacttaataccgtcaataatactcgcatgattttcttgatctgaaaacacgacacaatttgtatttttgaaaatattaaataacgtcaaattagcatcataaccactatttaagatggtacatgcactatatccgagccaacctgctaacattgtttcaatctcttcataagctgccgaacttccactaattaatcttgaacttgataagtgataactatacttccgcataaatttttcgaaatcattcttatcaaacgctatttgacctaatcctaaataatcattagatgtatagttcgtacatcgttgattttctacttcaatatactgtctatctatataccctaccgttttaagagaccgatataaccctttctgttgtaataaatcaatttgctcttgaaacatcattcttgttttccttattttcacaagtgccataatcaatttcaaagcccaaatcattaatcatatcgtagtctaattggttcggttgtccaccagtaattagataatcaccgacaaatattgaattcgccgcttttaatgctaatggctgtaacgaacgtaagttgacctctcttcctccagcaatacgaatttctttcgtaggattgattaatcggaataatgctacgattcttaaacatttcattggtgttaaatcatccatgcttccaaactttgtgcctttgattggatgtaaaaaattaatcggaatactgtcggcatccatttctttcaaagcaaatgccatatcaacaatatcttgattagattctcccataccacaaatcacgcctgaacatggtgatatattattcgctttcattagttctatcgtatctgttctatctttataactatgcgttgtcacgacgttatcatggtaattttcacttgtattaatattgtggttatatctgtctacaccagctgacttaagtttcttagcttgttcgtcattcgttaatcctaaacatgcacatattttcaattgtgggtgttgtgacttaatcgttcttactgtattactaatgtgatctacctctttatcacttgggcctctaccactcataacaatacaataggtaccaatatgattgtcatgtgccactttcgcaccatcaataatttgttcttctggaattaaggcatatcgctgtttttgtttaatatctcgtgattgtccacagtaaccacagttttcaggacatatcccacttttggcatttaaaatcatgtttaattttacttttttaccgaaataatgttttcttaaaatatacgcctcatttaataaatctaaggtatcaatattagtatcctcataaattttcaatacagtctcttttgttaattgttccccttgtaatatgcgtttagccaaattcatattaacacttcctatctaaaatgttatgtactgcctttttaaaaatacgtaccatcgttttcacttctttatttgacatacttaacagtggcacaaacgtaatgacattttctaaatttctaatcattagcccgttttctttacaattacgtacaatacgttcaactttttcaatttctaacggcgttttactatctttatctgtaactaattcaacgccaaacattaagcctcgtcctcttacatcaccaacatttcgatgacgcttcagcgcatgtaactgtttctcaagtgttgatgaagtcgtttctatatgcgacaataacttacatttttcataaagtcttatattttctaaagcaaccgtacaaacgatttgatttccggtgtatgtatgaccatggaaaaaggtattcacaccgtgcgaatcacttaaaaatgcattgtatattttttgagatgtcaatgtagctgcaagtggtaagtagccacctgtaatcgccttacctaaacacataatatccggttgaacatcttcatgattacatgcaaacatctttccagttcttccaaaaccaactgctacctcatcacaaattaataagacatcgtattttttgcacaatttctcgacttctttcaaaaagcctttaggatgaacaaacaagcctgtcgcaccttgaatcaacggttccaatataaaccctgcgatttcatcatttctttcaattagaatttgctctatattcgttaaaatagctgtcatcatttcattttcagtatcgtaattactgcgatagaaagatgggctttctacttgaatattctcaaatattaagtctttaaatattttatgaaaggtcttgataccaccaacacttaccgcaccaatcgtatcgccatgatagccgtgatttagtgttatgaacttgtttttcttggcatatttttctctatcaatatttttccaatactgatatgccatctttattgcgatttcaacagacgcactgcctgtatcagaataaaatacttttcttaaattacttggcgtgatttcgattaatttttccgcaagttctattgacggaatatttgatgatcctagcagcgtagaatgggcaattttattgagttgctttttaattaccttattcaagtacttattattatgaccatgcacattgacccacaaggatgcataaccatctaaatatttattgccattcgtatcgtaaaggtaactaccctttcctttttcaatgatgattgcttcttctttgctatatacacccatttgtgtaaatggatgccaaacatattctgagtctttttgtttaagttgttgtgtgtaattcatttttaactcctattaattgttttaaaaatgcttctgagaaattttcatacgtggcatgttcttcaaatgtatagactgttttatttgttaatttttcaatcgtcatttgattgtctttttcaatatagctgtctgtatagcgattcatgattaaaaaattattcaccgatacattctgattaacataatcttggtgaacaatggcatcgctaatagcacctaattttgatggcaacacactgatgacacaatctgcacaatcattgattagatctttagtcatgtagaaatcatctgtatcttcatatattggtacgccaattcccccagcaccctcaactaagataaaatcaaattccttatctaaaacttttaccttatctaatacacgctgcttatttagaaaaatttgatctgccattttaaatgcaaggtgtggtgatacaggttgcttaaaagtataaagtgacgttatgtcatagcttaaatcacattcatttttaaatacttctaaatctggaaacgtcccgtcttggcgttcctcagtttgaaatggtttaaaaacacaaacacgatgaccacgtcttttcaaagcatggtataaatgctttgtaacataggttttgcctacatcagtattcgtacttgtaataaaaatcctcataaaaaataagcacctcaatccaaatgtaaacttttataattaataagtttacatttaaggcgtgtgtttttcaagaaaacataaatttaaacttctcagtataactataaattttggcaaaattttgaccttgctattgaaatgactaaggcttcttacgaaattcgggcagatataaacagcgattcgataaaatatgtcagttaaaattaataattgcattatttcttaataaaaagacttcctagctttaccatgttgtgaaacaatccattaattgtaatattacgttgagcgccttgttcatcaatgctataattagttacataataaattgaacatctaaatacactaaatcccctcactattgccctagtgatgggatttattttgctgttgattatctatcaccctttttatttccaaattctgattccatattaaactattatttataatttccagcctgctgatttactttttattcttataaagtcttgatacattcctggttttcgaattaattcatcatgactacctttttgaattatttcaccttcattgagcactataatctgatctgcatttttaatagtttcaagtttatgtgcaattgtaattactgttttgcctttacttaattcattaattgccgtttgaatcagctgttcgttttcaggatcaatacttgctgttgcttcatctaaaataataattggtgcatctttcaaaattgcccgcgcgatagaaattctctgtctttctccaccagataaattattgcctttttcatgtaatactgttttatatccatcaggtaacttcattatgaaatcatgacaacatgcctgttttgctgcacgaatgacttcttcttccgtcgcatctggattaccaaataatatattattttcaatcgtgtcattaaataaatataccttttgaaatactgcactaatttgtgacatcagcgaacttaatttcaaatctttaatatcaataccaccaatacgtataaatccatcattaacatcgtaaaagcgtaaaagtaaatgacataaagtagattttccacttccagatggcccgacgatagctgttgaagtgtttgcagcaatgtcaaaacttacattctttatcacctgtttgtcatcatatgaaaaattcacattttcaaaagcgatatcatcattttcaatcgttaaatcttttcccttcttatctaactctggcgcactttttatcttttcaatgtcttctaatgtcatatcaattatttcgagtacgtgtgctgcactattaatattttcaacactatcaaaaattacaaatgaaaaaattgaaatcataatgaatgtaggtaaatcaatactattatgtataaataataagcacgcaactaacacaattaatatcgaagtaactttcaaactaagtaaatgtagtaaattaaatggaatgtactgcatttcaatttttgtattaacacgtttactctcattaacagctcgattaaaacttctaagacttgcattttctttcgagaatgatttaatcacttgaatgccacggataacttctaccactttttcaattaattgattttgtgcataatgatacgttggcgcattttttttactcttgttttccaataattgaatagttaaaaatgataataatacaccaatgcatgctaataatgctacttgccatgatacgaccaataaagacaagataagtactgaaattaatatgtatccattaatgacaatatccaccattttcatggcaaagttttctagaaatgttaaatctgtagtaacaatagttgttaactcatttgagtgatgcgtattaaaatatcctaagggaacgttttttaatttattaccaatatttaaacgttcattcgcactcatttcataagcaatactttcctgatttttacttttcaaatatgctgtaataaaccgaccaagtactaatataatcatgatgattacaacattaaaaatatcttttccatatatagatttatgagatactacattattaaatatttgtgaagccaaaaaaataggcagtgcaataaatattgcatttaaaaatgacatgataaatcctaaaatcatccttgttttatatggagatacccaatttaaaatcttaaatgtaatcctaaacatgtttaacctcctttactcatcaacttaattactttcggtattgatacctcagtcttttgtatgcatatgcatatcccacatatttttgtaatgagcttctaattttagtaacaattgatgtgagcctttctccaaaatttgttgattacctaatacaataatttgatctgcatgttgaatcgtagataaccgatgtgcaataacaatcaatgttttatcctgcgtcaacacatttaatgcttcttgaattttttgttcactatctggatcgacataagcagtagcttcatctaacacgatgataggtgcatcttttaatatcattcttgcgatagtgacacgttgtttttctccacctgataacttatcgccaactgaacctacattcgtatcgtatccctctggtaactttttgataaattcatgacattgtgctaacttggcagcttttacaaccgcatcatcactagcctctggattacctaatttaatattttctttaaaagtaagatttaataagaagttatcttgtcctacataaccaactaattcgttaagttgctttggttctatattttttatgtttacattaccaatcgtgatttctccagtcgttacatcccagtaccttgatatgagcttagctatagttgacttaccactaccagattccccaacaatcgctgtaaaatgattttctggtaccgtaaatgatagattcttaaagactctttcgtccttatcatttgtatatgaaaagccaacattattaaaagcaatttcataactttgaggttccataaatcgtgatgacaatgctaactcttctaagattaatatttgatttacttcagttaatgcgtattggattgattttaaatgattcacataattagtaaaattcttaatcggtgctactacacctaaagataatacgatgcataggaaaaattccgcatagtttaattggttgatagatatcaaatacatgccgaccggtaaaatccctaaaaatgttgaaggtaatacactagctcctaaattcatatacccccatgtatttttaaaccaatttaaagtatgtattttataattatctactgcatcttgatattttttatacgagctttgagattgattaaatgttttaattacctcaataccttcaatatattcaacaatggcgctattcatataattattcgattgcatttgttttgcatatgtctcattaaatccagacattaatttgttaaaggcaaacaacgcaattggtatagttactaataaggcacaagccatacgccaatcaataagcattatgtataaaaagatagcagctgacaaaagtaagtttcctataacttcaggaatcatatgtgctaaaggtaattctattgtttcgaccttatcgacaaatatattttttaattcaccgattttcttagactctactacccctaaaggtagatgcattaattttcgagctaattttttacgaatttcagataaaatttcatatgccgtaatatgtgatagcatcgttgacgctccaaaacaacacacttgtgaaatataagcgattaaagcaataaaggtataaaccataatcgaattaatcgtatatgcattgttaatcatcattaaaataattttaaagactgcccaatatggaactaatccagaaaagacactgatgatagacaacaaaattgataacataattttccatttactatcagaagcaaatccgctgagtatctttatccaatttgtctgattgttcatcgtatatgtaactcctttcaattaataatctaaattaagccgcttatattatttatttcactggatgatatacataatataaatttgttatttgttaaaaattaatacttattacaagtacatcatatatcagttgataacgattatcaatgtcacatggatttgtgacatatttcttttaaaaattcacaaggttatggggtagaaatgataaagagctactaatgatttattatgtagtggttctttatccttagccacagctaatatgtacttaaaaataggaatatatgagtaaaactcatgcataagaaatactctgtgttggggcccgccccaagctctcaataattgattattctctttatctaatgatcctataactcaactattaaatcattttccaaaatacttaattctaatataattaaattcattaattgtaatattgtgaaaatacattgcacaccttgttcatcaatgctataattagttacataataaattgaacatctaaatacaccaaatcccctcactactgccatagtgaggggatttatttaggtgttggttatttgtcaccttttttattgttgcgcgttcgtaaccaatgtgcaaaaaacgcaacaagacagccgcttaaagctgaagtcatgatgtcaattaataaattgaacatccgtcatacacctcctctctgcgttaaagtaacgcccgagatgttaggcgaccattatattatatcatttatttattatatttcacgcaatattaaagttcgagtaaagcgttttttagtggtttacgctactttaattactatcttttaaaatccatttagataatacaaatgtgatgggtatcgtaataattaaaccagcaaatggtgcaatttctgctggcaaatttagccaggatacaaatacatataataaaactgtttgtaagcttacgttgacaatctgcgtaattggaaaactaatgaattttctccaagtaggttttaccctgtaaacaaaataacaattcaaataatacgaaatcacaaaagcgactataaatccggtaatatgactaatcatatattcaatgtgtaataattttaacagcaataaatagacaacataataatttaacgtattaataccgccaacaatgataaattttaaaatttcagcatgcgtttgtgttagtttcatatgtgtaactcctcaacatcaaaatatatgtataactgcgttctccaacatactcgaatatgcgagccaatccgcttctcttcaaatatacttatttcagtttttataccctttcacagcaaatttagtctctttcccctcatccttatacgacattataatgtaactgatttatcgcgcgactcattagcactatagagattactttagttcactagtaattttatatacaataagagcgacaacagtaatgagaggatgtctactatgcaattacaaaaaattgtcatcgctcctgactcatttaaggaaagtatgaccgcacagcaagttggcaatattataaaacaggcatttactaatgtttatgggaatacccttcattatgatatcattccgatggctgatggtggtgaaggtaccacagatgctttaatgcatgcaacaggtgctactaagtatacagtcatcgttaatgaccctttaatgcgacctattgaagcatgttatgcacgcgcagacgaacaacaaattgcaattattgaaatggcagcagcgtcaggtttggatttattagaaaaagaggaacgtaatcctttatacacatcatcatatggtaccggtgaactaattaaagatgcattaaatcatggtgctaagaccattattttagggattggtggcagtgcaacaaatgatggtggtacaggtatgctaagtgcactaggcgtaaagtttactgatgtaaacggggacttattacaaatgaatggtgctaatcttgctcacattgcacaaatcgatataaccaatctagattcgcgattaaaagaagtgacctttaaagtggcctgcgatgtttcaaatcctttattgggtgaaaatggtgctacctatatttatggtcctcaaaaaggtgctgatgcaaagatgataccaaagttggatttcgcaatgtcgcattatcatgataagataaaaatgtgcacaggaaagtccgttaatcaaataccaggttctggtgcagctggcggtatgggcgcagcattattagcgttttgtgagacaactttaacaaaaggtattgatgtcatctttgacattacagattttcatcaaagaattaaagatgcagacctcgttattactggagaaggacgcatggattatcagaccatctttggcaaaacacccgtaggcgttgcgttagctgcaaaacaatatcatattcctgtcatcgcgatttgtggcagtctaggcgaaaattatcaacatgtttacgatttcggtattgatagtgcctattctataatctcttcacctagcactttagaagatgtcctacaaaatagcgaacaaaatttattaaacactgcaactgacattgctcgtattctgaaattacaataatgtcaaagtaaatcatcagctttattatttgcagttaaaacttggatgaggtgaaacccatgaaaagaactgataaataccgtgattcatatcaatacgacaatcaaaaccaaaatcatcgtcgtcaatctgaagacgcatcgtatagacaacaatatgctaaaggcgatcctgaagaacacccggaacgatactataacggtagagattatcgaagagaacaaattcttgaagaagaaaacgagaaatcccgccgttcaaaaaagtggttatatatcattattgccattctcttaattattgtcgctatttttgtcacacgcgccttacttaacaatgatagcgataaagttagtaatgaccctaaagtctctcaaaattataaaaaacaagttgaaaatcaagacggccaaattaaccagcaagtcgataatgctaaagaaaatattaaaaacaaccaaaaaactgatgacattattaaaaatttacaaaatcaaatcgacaacttgaagcagcaagaacaaaacaaagctgattctaagctaactcaattttatcaagaccaaatcaacaaattgacagaggcaaataatgcacttaaaaacaatgcaagccaaggtaaaattgaaagcatgttaaatgatattaatacaaaattcgacagtattaaatctaaattagaaagcttatttaaagatgacaatggtggcgctaattaaatattaaacctgcttttgatgataaacattaagtcctatactttatctgtatcactacgttattaatgatgatacattgcgagtataggactttttatataaacttatattctaactacatacaaatgcacataaaacgtatataatttacataattatataaattaaggagtctgtttatgcaatcttcgagttccaaaacgaagcaattttcatttttattgttaatcacgttaggtgtcatgacagcttttggccctctaactatagatatgtacgtaccatcattacctaaagtgcaaggtgattttggttctactacatcagaaattcaattaacattatcattcacaatgattggtcttgcactaggccaatttatctttggacctttatccgatgcttttggtcgcaaacgcattgctgtatccattttaatcattttcattttggcatcaggtttgtctatgtttgttgatcaattgccattattcttaactttacgatttattcaaggtttgacaggtggtggtgtcatcgttattgccaaagcctctgctggtgataaatttagtggcaacgcactcgctaaatttttagcatctttaatggtagttaatggcatcatcactattcttgcaccattagccggtggattagctttatccgtagcaacatggcgttctatttttacaattttaacaattgtggcactcatcattttaattggcgtcgcttctcaattacctaaaacatctaaagatgaattaaagcaggtgaattttagtagcgtcattaaagactttggaggtcttttgaaaaaaccagcatttattattccaatgttattacaaggtttaacttatgtaatgctatttagttattcatctgcatcgccatttattactcaaaaattatataatatgacacctcaacaatttagtatcatgtttgctgttaacggtgtaggtttaatcattgtcagtcaagtcgttgctttattagtagaaaaattacatcgccacatattattaatcattttaactattatacaagtggtaggtgttgctttaattatcctgacacttacattccatttaccactttgggtcttactcatcgcattcttcttaaatgtgtgtcctgtgacgtcaattggaccgcttggtttcacaatggctatggaagaacgaacaggtggcagtggtaacgcatcaagtttacttggcttattccaatttatcttaggtggtgctgttgcaccactagttggcttaaaaggcgaatttaatacatcaccatacatgattattatcttcattactgccattctattagtcagtctacaaatcatttactttaaaatgattaaaaagcaacatgtcgcataacacttcaacataattagaaccctggcaaagatatctatctttgtcggggttcttctttatgaattatgagatccaatcttcaactaaaattacgccttcatatcaagtacatttctattcaattaccctttaacaggcatccaaatttctgtaatatattttccacttgtagtatcaccatcctgatacaactcaaaaaatggtgctgattttaccgtatctgcttgatattgatgtatgtagtgatgaacctcttccattttttgttgaactgctttaggtactgcgccctgtgcttcaaataccatatactttgaacttgctaatgttatgacatcatatttttcaatatcagcactattatctccggtaactgcaatcatatatgacatcttaccgtctaattcaggtatacataagccaagtatcccggctaaatcaccattattttttaactgtaaatccgcaattactccctcttgataacatctttgccaaaaccctgctatatgttgctgagcctgtcgtccattttcatacgtttctttaatacctactaacgttaacgacgcaagttgttgtaattgatattccattttatcactccattaattttattcactcatgtaaaacatatgtttaggacattttgcattgacgctatataattatattaaatatttattgaatcaatgcgaggactatattatgaaccgaaaaatattaccagttaaacctatcagtcagctatttcctatccctatggtcatggggtgtgaaggtgtttccgcagccatgatgttgcaatacaataaccaacatatccctgctacagaaattatgagacattggccgacacatccgaacaatccacataaaggttatgttggacatcacttattcattaagcttggcaattatcatcaaacgatatttccagaagcatatgtaccatttttacaaaaatacaatcctaatatcgtagacggcactggtaaatccttagaagatcttaaaggtattatcgatcaaggtcaacctgtgttaatataccatactaatcttggttctaaaccattactacgtgttttccgctttgataacaagccagcgaaacaagtttcaaatattcacgtaacgttactaattgggtacgatgattactattactattatatcgatccactttggagtcatattcgtcgtggtctagttttacctgccatcattccaaatcgcaaacaaattattaaaattcgtaaagagaaaatggaatacagctttaattcaccaggaagaaagtgcatttatgtgcaaccacattcatatacaattgaaaatcagcaacaaaataaacacacgtaagtaaacacattactcgcgtgtgtaaaacataaaatgcgcaaactgggtcaggtttgcgcattttaaatttctattatttgtatcgtctcatttatttcctggtaaatatcttctgaacgccattgtcttggatagcctagacacggacagagataacatctgccatcatccatcacacttttccgaaaatgaacatggcccataatactatatggtatatcgaacatcgcatacaaaggattgaaatcacttgtcccaataaatgcattataaaaatcgaatatacgatgcggcataggaacaatgaaatcagggtgcgtcacaacatgtgtgactaaaatcactcgtctatttcctacttctaatatatctttcttaacttgttcagccgctatttcagataaattttgatctgatatgccccaagatattcgttctttatcttgccaagtcgcaccataatgttttcctctttgtaactcatctaatgaaaatcgttgtgctgcaaagctataatcataccaacctgtatgtcctattattgcccattcttcatttactataaatggttttcctaccaagcactgtgacatactcttataattattccaaatgtcttgcgtagtcatactttcaactttccataaatcatggtttccaggaacaaatttcacaggtatatctaattgttttgtcaattgcgttataaattggtgcgtcaattgataatgatttgagatatcccccgcaatcaacaatatatccaaatttttatacttaactatttcaaccaatgcctctaagtaatcttcggatgtttttttattatgacgatcaatatgtaaatcggcgattgtccctatcttcatacccataccttctttaccaaattaaaatgttatttattatgccatagcttatctaatatatatagttaactgcttcatttagatgatcattttatatttttgcacaaaaacttatatctttccaaaaaatcgataagttttagttatcatacccttacctatcaaatgttttttcttatatttaaaaaaataattgctttattaaatggatttctttagtatttataattaagaaaacgcttacacacaacttttttatttgctttatcctgaggaggaaaattatggcaagaaaattgcatagagagttgaataacagacacatccaattgatagcaattgggggcgcaattggaactgggttattcctaggatcaggtcaaacaatatctttaactggtccatcactgttattcacatacatgattattggggttgtactattcgcttttatgcgcgcattaggcgaattgttgttgagcaatacaagatttaattcatttgttgatattgcaaatgaatatttaggcccttttggtggctttgtcattggctggacttactggttatgttggattgtatcaagtatgtcagacctaactgcgatgggacaatactttgcattttggtatccacaagtcccaaattggattaccgtgctatttattgttttaatcttgattagcttcaacttattaggtgccagattatttggtgaactggagttttggttctctattattaaagttgtcacaattattgcgatggttatcgttggtcttgtattaatctttttctcatttaaaacacattatggacatgcatcattcacaaacttaatcagtcacggcggcatgttccctggaggaacatttggtttcctaatgtcattccaaattgctgtatattcattcattggtattgaacttataggtgtaactgctggtgaaacgaaagatcctgaaaaaaccttaccgaaagcaattaataatgtacctatccgtattttattattctatatcggtggtctattagtaattatgtcagtcataccttggaatgatatcgatccaaatagtagccctttcgttaaactctttacattaatcggcgtgccatttgcagcaggtgtcgttaactttgtcgtgctaactgccgcggcctctgctacaaatagtggtatctattcgaatagtcgtatcttattcggactgtcacaacaaggattaggtcctaaagttttaaataaaacgaatagtcatggcgtgccttatttatcaatgttagtttcatcaattgcattacttatagcagccttgttaaactacattttccctaatgcaattcaactattcatatacgttacaacgttatcaactgtgttgtttttagttgtttgggcaatgattattgtcgcttatctaatgtatttgaaaaagcatcctgaggcacataaaaacagtaaatttaagttgattggtggtaagcctattgcttacattattctagcgttcttcttctttgtattcattttattattctttagtgacgaaacaagagcagctatttatatttcgccattctggtttatatttttattcttcttttataaaaaatataaaacgaatgctgaaaagctcgcatatgaacaacgacaaaatgacagcggtcatttcagatatgacaatcaataatttaaacatcttgctctagtatcagttcaaccgatactagagtttttttgaaaataacttcattttatcaatatatctatgtcattatgccttaaaagtgataaaatattaactattaaaattttgaggagtattgtatggcattattagaagcatttttaatttttatttttgctgtgattatcagttcggttatcaataatcgatttccacaaattcctactgcctttattcaaattgcattaggtgtcattattttcattattccaatacaagttgatttccaattcaactctgaagtatttatgttcgctgttatcgcgccactgctttttgtagaaggtacccacgtctctcgaacaaaattattagaatatcgtaaacctatactattaatgtcaatggcactagtgtttgcaactgtagtcggcgttggctattttatacattggatttggcctgccttaccaatgccagccgcttttgcaatagcagcaattttatgtcctactgatgcagtagcagtatctgctattacacgcggaaaattattacctaaaggttctatgacgattttagaaggtgaatctttactcaatgatgcagcaggtatcatttcatttaaaattgctgttactgcattagtaactggtaccttttcattattccaagctgttgaacaatttatcatttcaacaatactaggtgtacttattggtgcaattattggattcgttgtcgttagaatacgtatagacttaaccgctaataaaggtttaaaagataacaataccttaacttttattcaattattaactccttttgtcgtatactttttagcagaagaagttcatgcttcaggtatcattgcagttgtaatcgtaggtctaatccatggtttagaacgcgaccgtttaattagagcacaaacggaactacaaatgaattaccatcaaatttggaatacatttagttatgccttaaatggttttgtatttgttgtattaggttttatgattcctactgtagtcatagatattttccaaacagagcctgacaacttttcatttttaatagtgatcactatattaatcgctattgcaatttatgtatgtcgatttgtttgggtttatttctggtacaaagatttttatttcccgaaaaatatacaatcttatctagacgaggaacatgattcacatgaaacaccaccttctcgtgtgcgttacgcatttattatgaccatgtgtggtattcacggtacaatttcactttcaatggcacttacattaccatttatcattacaaaaggacaagcattcgaataccgtaatgatttattgtttattgcatctttcatggtattaattagtttaatcttagcgcaaattgttttacctttaattacaccatctgccgaagatactacttttaaaggtatgacttatcaatctgccaaaattttcattgtccaaaaagttatcgaacattttaaaaacgaaagtaaaaaagacaaaaacgatacaaattatcgcccagttttaaaccaatactttggagaattgttatttttattaaattcagaacctgataatcaaaatacaaaagaactcaaacgtttagaagatattgcaaaagtaatcgaaacatctacacttgagcgtttaattgataaaggtaaggcaacatatcaggatataaataattaccgcaatattgtcgaattaacagagacacaccgtactgcttcatttgttgaaaaatttgcaaacttcttcaagatgttatggcttagacttaaagcgatgaagcactacaaatccttaaacaaagaatctaagaagcaagaatttgaaaattcattcaaagatgttcaaaaaattatgcgtattgtgaatcacaatattattttacgcttaaaagaagaacaaaatagtacaaatgtacttgaggttagcttagtcattaatcattactatgatatgagtcgctcattaaagtggcgtgcgcaacgtcgaaaagaacgtcaagaaaacagcaatcaaatcataccgcaagctatgttccataaccacaaattggaagcattgtacttacaacgtcatcttttagatgaattaattcgcaaaaataaaatcaacaatatcgttgcagctcaaattcgagaaaatatcaattacaacgaaattgtcttgtctttacagtccaaacattaagcaagacataacaacaccccgtacatatgagacaaaatcatgatcatctcatatgtacggggtttttatattcaacatcaaaaaatcggattgatgaaaagtaaataacctttcatcaatccgatttgattatagaatctattttttaagtttaaatggaattgtacatacgttaacattcttttgataaattaaatacaatttcatacgcaaactagtttgattgtgtaataaattatgccaacgtttcttagtaataaattctggtatcactactgtaatcatatagttttgatcgttggctttacgattaatcttatcgataaaacgtgaaattggtcgtataatactgcgatattccgagtgtaaaataactaatcttacatctgggaaatgacgtttccatttctcttggaatgctttttcatcttcatctccaaatgatacatgtactgcaatgacatcattattcgcaagcatttgtgcgtaataaatagacttatcaactgcagttgtaatgcttgttatcggaacaattgctaaattacgatctactacttctacattatgaacatcaatatcagaacgcaattgttctgcgatatctcgataatgtttgttaattttcaagaagaaaattaccacgaacggcaagaaaataagtatcggccaaacttggctaaatttagttatgagtaaaatcataaaaacaataaatgtcacgataccaccaagtaagttcacagacaacttacttaaccaattcttaggacgttcatgaatccatttaataaccataccgaattgtgctagtgtaaatggaatgaatacaccaaccgcatacaatggaattaaatcttcagtcataccatcaaatacaataattaaaataatggctaatacacctaaaataataatcgagttagagtagcctaagcgatcacctctaacagtaaacattctaggcatatatttatctttagacattgaagccgctaacatcggaaaagctgtaaatccagtgttggctgctaataccaaaatcatcacggtcgttgcctgtacaaaatagaaggcagcattatcaccaaatatttgcatagctaattgtgataaaactgtcgtttccgtttgtggcataattccataaacatatgctaaaccaacgataccaactaataaaaacgctaaaattgaacccatagcaattaacgtttttacagcattattagcacttggttctctaaaattggttaccgcatttgaaatagcttcaacacctgttaatgatgaagcccctgatgaaaatgcttttaatagcaagaataatgttactccaggaaccgcagttcctactgatgcatgcatatgtggttgaatatctcctgtcgccacacggaaagtacctataaatattaatatcactaaccctataatgaaaagatatactggataggataatacggtggcagattcagttaaaccacgtaaatttaatattaaaataaaaagtacaagtaaacatgcaatcagtactttatgcccatataaacttgggaatgcagcaacaaatgcatcagcaccagatgatatactaacagcgacagtcagtatgtaatcgactaataatgagcctcctgcaagcaatccccatttttctcctaaattggtcttggacaccatatacgcgccgccacctttaggatatgcataaataatttgcctataagacataattaaagcagctaataagatcagaacagcacctgcaatcggtaaagtataccaagttgcaactgcacccactactgataatgtaatcagtatttgttcgggaccgtaagctactgaagataatgcatccgacgaaagaatcgctaaccctttaaacttcgatatcttttcgtcttttagttctctgttttttttaggttgccctataataagtcttttaaattgattgaacataatctcctattcctttttatactttttgatggatatcactatacgcctatcttcccaaaaagtatagagagttaattaatattttttatgtaattatacacctattaacatataaggtgtcaaaaataatggtaaatatacctctttaattaatttattcaatagaactggtataataaaataaatctcattaggcacttaagtaaatttaacatataaaaaggaacgtttatgactactaaaaaactgtattttctatccatttctattatcattttagtcgccatttcaattgctatatatataacattaaatagcaatacgaagacacggttaaccaatgattcgcaacaacaaatagatacaattatcgagcatgatttacaaaagggacatattcctggagcatcaattttaatagtaaaaaatggcaaagtttttttaaataaaggttatggttatcaagatgttgataaaaaagtcaaagcttctcccacaacaaagtatgaaattgcttctaatacgaaagctttcacaggtcttgcaattttaaaattagctcaagaaggtcgattaaacttaaatgatgccgtatccaaacatgtgcctcattttaaaatgaactataatggtcaaaatgaaactattacgattaagcaacttttggctcaaacaagtggtatacctagtgatattacaagcgaagactccgtaacaaataaaaataatcgtttaaatgatgtaacccgtgcaattatgggtgatgaattacatcataagcccggaaaagaatttgaatactcaaatatgaactatgatttattaggtttaattatccaaaacgttacgaagcaatcctatacaaaatatattacaaattcatggctcaagcctttgcatatgacacatacatcattcaaacaaaccaataacaaatcaaaacatgatgctattggctacgaattacaaggttcgacacctgtcgtctctaaacctgaatttaacctttgggatacaccatcagcatatatgttgacatcaactgaagatttggaacattggataaaattccaacttaatccacctaataaatacaaatcattagttcaacaatcacataaaaatttatcatcaacaatcggtgaacctaatgccaatgcatatgcttccggctggtttaccaataatgatgaacatttagtgtttcattcaggaacgctcgataacttttcatcatttattttactaaatccaaaacaaaattatggaattgttgtgcttgcaaatctaaattcggaatatgtacccaaattagttgagcatcttaacacacaattattaaatcataaacaatattctactgtagcatctgtactgaacgcgcataaagatcaatttaatattgttaccgttttgatgacaacacttattttattagcatttatattctcagcttatcgtgcttggcaaatgcgtcacgggaaaatcatcctgcgcaaatcaaaacttaccacatttttaagttggctaactttatgtttatgtatcgctatagcgctcatattatatgcattaccatatctcattctcggtagcaataactggtcttttgtactgacttggctgccaatagaaattaaattaacgttaactacaacatttattgcattattcagtatgttaattacaattctgttagtactacatacaacgacaattaagaaaccataaaaaagacttgttcaatcgcacatcaatccgaaacatacatatttatgtatgaggattagcgatttgaacaagtcttcattattaacatgctatatgcagaaaccgattatttaattggattcatgccatctttccaagttttataaatcagagtaccaccttgcgctttaaacttctcattgcttacgccacgttcaaatggttgcgcaggttgaatatcaatatttggttcaacaccaagttgttctttataccattctgcaaattcagaacctttaacaggtgcatcatctgctacattatagataccattttcaaaatgaatagcttgaatagatgtttcaactgcatcatcaagatgcacaaatgatgttacgccatctgaaagtgccacttgaccatccataaattgattataaatcatgccatcttttccataccaagtacctgggccatataaccagccaaaacgtaaaacaacgtattcatccatacgagccgtttcttcttctaaaccaacaacaccatcaactgttacttttctgtcaccagttgagttaaaatcaagtgctgtcgtttcacttgctaatccttcgcccggttcatacataaaggcaatactttgggcaattactttcttaacgttatgctttttcgctgcatcaattaagtttttagaaccttcaatacgtactttcgtatttgctgccatatcaacattttttaaatccgtaatttgattaataatgatctctggcttaaaatctgctaacgcttgatcaatggtatcagcttttaatatatcaccaatatatgcttttacattaacagcagctagcttttgttgaccattctcagatgtagtaaaaccagcaacctcatgcccctcttcttttagtctttgaactaatttaatgccaataaggcccgttgcaccagttacaaaaattttactcattataaacaccttttctctatttgtcttttaatataaatacttgcttgatgagtgtataaaattcacgtaagacttccaaatgatttgcctcaaaatttttcaaagtgtcgtcgtaaaaactgtctagcaaatgctagtagtatgtcgtagacctatgacaaatctgaattatgaagaagaccaattaagaaaaacagcaccaagatcatttcaatttgaaagtaccttactgctgttctttatttattacatttcaatcttaataatgaccataattatcacgtgattgtcatttacttataatcatacctaaaaacactaattaatcctgtgcatgtcgctgactttctttagtatgaattaaatcagtaataaagcgattgactggcgcttcaatatgacgttgtttacctaaggttgcaactgcgccattaatataatcaatttcagtttttctattattaacaattaaatcttgatacatggatggataatgcgcaccaactttttcatttaaatcaactaaatattcaaatacttcatcaacatttaaatgaacattatcaatcgtcgctacatgcactatttcttgcgttaatttataaatcaaacacttcgcataactactttcattcagtgatgccatattacactccaacactgtgcttaatgcatttgccgtaccattaacacaaatctttttccaaatcgattggtataaatctttactcatgacaccattcaattccgcttcgttaagtaaatcagcaacttttataacattttctttaccttcatcaactagttcacctatttcaactggtccactaccaagtaaatgactgtgtccagggctttcaagacctgccgtccaagtcgtaacacctctgacaatttgtgattgagcaacatactgcgcaatgacttcttcatgcttcaagccattcatcgtacatacgacaatcgtttcattatcaatatgtggcttcatagcttccatcacttcttttaattgcatagactttggaaatagaaagacaacatcgtaaatgctttcgtccggttgatcattaaaatgatacatcggaatgtttaactcgaatgcctctccattaatcgttatatttaatccatgttgcttaaccgcttcaacatgagatgtatatccgtcaataagtgtgacatcatatcctgcttgaaatagtttggcaccaaagccactacctaatgcacccgatccagcaattgcaattttcatcctataaacccctcttcatcgttgttgttcatttttaaaatactactttcgtatattagcgtcaatttgaaaatcactcgcttaatatgcacacagcttttatcatctataaaagaacacacctaacattaaacgtcaatacgcaacattaagtgtgtatgataaactcactttcacaaaattttctttaaaacatttacataataacttgctttcatttcagttttacaaattcgtttgatttttaggaactaatagtaaaatgactaaaaatgcaacaattgctagcaaggcattaaacatcatacctgtgaaaccacctaagttcaaatttaaattagctgctaacacagtataaaccgtaccagatactgctactccaaatgcatttcctaatgatgacgccattttatatacgcctgaagcaacaccggacttatcatctggcgcacttgcaactgctgtatcagttgatggtgtagcatataatcctaaaccagtaccaaacaataaatatccaactatactagatacgatataccacatttctggtaaaaatgttaacgacaataagattaacccaatcactgtaaagccacttcctagtaatagtgggcgtttcggaccatgttgcgataaaatcttttcacctacacgaatcattgacaacactgctattaaatatgttaatgaaatataacccgtttgcgaagaattaaatcctaattgttgttgataatacgtgttaatgacgataagtgcaccacctgctacaccatttaataagaagtttgaaatagttgcaccactgtatcctctatttttaaaaattgaaaaatcaacaagtggatgctttattttattttcgtaatatacaaaaccaactaatgaacagataaacactacaattaaacctagaattaacggtgaaactaaaccaaaatgagacgtctgtgtgatgattacatttaaacttaacattgtcactactaaaatgactaacccgataacgtcaaactttttagcttctgctttcatacctttgattggttctgctttagtctcaggtgcatgtttgattaagtacattgctaataatgttaatagaattgaaacaacaaatattgaacgccaacctatatatgtagccattaagccaccaaacaacgtacaaataccactaccaccccaagaaccaatagaccaatagcttaaggcacgttgtcttcttgtaccaatataatattcgttaataatagcaagtgtggatggcataatacatgctgcagacaaaccttgaattattctacctataattaaaaatgctggcaaaggtgtaataatgatgagtaatgaacctacaacatttaatatcaatcctacataagtaattttgacgcgaccaaatttatcagcaacatcaccagcacctacgataaacaaaccagcgaataaggcagataagctaacagcgatatttatcgttccaacgtcactactgtatgttgattgtaatgggacaacaagattaacaagtgactgcgcgaatagccaaaaggtaatgacccctaaaacgatacccaaaagcaatcggttgtcacctctaaattgttttgatgtgtccatgaattagataagcctcctatgtttaagaaaaacaaatttttaatatgatatattaagaaacaatatcataaatttgcagaaaattataaataaaacatctcattttttagtatttttacaataattaacgctttttatccaaaaactttcgtgataataattgctattttagtgtaaacgcatacaaatacaacctataaaacggctactcaaagattatttgagctccttgagtagcctcatttttataaaccatgaaacggaatcgctaaattataaacatcttctactattacatattaatactttgcggccgatgattagattgattttttcgatgtcgtgtcgttgggtctaatcgtttttctaaaaatcttaatagtacatcaatgacgattgcaatgatagcaatcggaatcgcacctgctaaaataaacgttgtgccatccgtcgcatttgtaccacgaatcacaatgtcaccaagcgtaggtgctcctataaatgatccaacggcaacaacacctatcgcaacaaccaaggcaatacgaatgccaccgataataaccgaaacagataacggtaattcaatcattcgtagcacttgattgcgtgtcattcccatacctttgccagcatccttaatattcgcatcaacactagctataccagtataagtgttttttataattggaagtaacgcatataaaaacactgttaaaactactgtttctgagcctaaacccatgactaacattaaaatagctaacattgcaatgactggaactgtttgaattatatttgcaattgtaattacaaatccagaaagttttgtgtatcttgcaagcaagattcccaatggaataccaattaaagctgcaaacagcacaccatagacagacattaataagtgtttgaaaaataaatcccatagatagccaaagttcgtaacataataattgaataattgctgtaataaacttccttccattacttatgaccacctttctgtttatcaaaatagtggtgttttttcaaaaattcttctgcgacgacagcaggttctttacctttaccatccgcttcataattcaagcgctgcatctctgaagttgaaatctttccagtcaacttattaatcgtcgttgtaagttctgggtgttggcgtaataattcatttgttgcaacagcactcgcagcataaggtgggaaaaattgtttatcatctttaagtactttcaaatcatacgccgcaattcgaccatctgtagaataacctaatgcaacgtctaacttccctgagtttaatgcgtcataaacgagacctatttgcattggtcgcacggtaccaaagtcgaaaccatactcttttttaaatccttcatagccatcgcctttacgattcatccatgaactatccatacctaaacgtaaatctttactatgctttgctaagtctgaaaccgtctctaaatgatattttttagcagtctctttcgttaccataaaggcatacgtattcgcaaaaccatacgaattgaaaaacgtttgatcaaatttctgtttaaatccttgttgcgttgctatcattgctttcttaggatctttgattggtgcttcctttaaaactcccgttaaatctgtgccattatatctaacacctgatatattagcatccccattaattaaggcattatgttgaatcgtacttgaccctaaattatttactaatgttggctttatcttacccttcgtatcgtgttctattaataatcgcagcatatgtgaaatgatttgtgattcactcgttgataatgctgtaattttgacatcattttccgtactcttactacctagtccgggcaaactacatccagataatacggtaagcgataagacaagcacgacaactatatatttaattttcttcattatcttagcctcctaattatccagatacttttaaccctttaggaactacccatttttcaactaaagctaataaggcatcaacacctaatgctagtgcagtaacgagtaccgttgcagttacaatcatcagtggatcatataaatttaaaccattgaaaatgaaatcacctaatccacccgcacctacataacttgcaagtgtagcccaactaattacatacacagacgacaagcgaataccgcctagtataagcggtaaggctaacggcaattcaacatccttcatcaattgaaattgtgtcattcccatactttttccagcttctttaatgttgctatcaatattttgaacgccgagtaccgtgttatttaaaataggtaataatacataaataaatagcgctacaattgcaggcgttttaccaacaccaaaaatcggtatcataatagcaagtacagctagtgttggaatagtttgtaacacacctgccacagttaatataatattggcagttcgctttgtttttgataataaaatgcctataggtactgcaacaatgatggcaagtaataatgccactatagaaatatagaaatgttccagtgttttcgacatcaactgtccgccatgttcatgtaggaactcgatcatgatttatcatctcctatgtcacgtactttgacattagtagtgtgttgctcatgcacttttgaggacgcagtgtctttccccacatgttctgtttgcactgtatcctcactatcgccccaaatcgtgtcatatacaatatcaacaacattggcacgcgtaatcagtcctactaaacgctgttgatcatctacgacaggtacattcctaacgtttctttttaaaatcgtacgtacagaatcttgtaacttagaatcaatttgaacggtataaatatgttgttgcatggtatctcgtaaacttttgtgtccacgtataccctgatttatatcttcaatatctaagaatcctagtaaatggttatccctatctactacaaaaatagtatcaacacgtttttgtctcataatatgaacggcgtcattcagtgttgcttctgcttgtatcgtgattggtttaatcattacactttctacagtcttgtcattaggacggtcttgaatcagtctattttgtcctataaaatcacgtacaaaatcatttgcgggatgtcttaaaatattgtccggtgtatcaaattgcactactttaccttctgacataatacaaattttgtctgctaatttaatcgcttcatccatatcatgtgttacaaagataaacgtcttgcctaattttcgttgtaacgttttaactaaatcttgtaacgtatctctcgtaataggatccaatgcaccaaaaggttcatccattaaaataatatcttgttcggccgcaagtgctcttacgacaccgatacgttgttgttgcccacctgatagttcagctggataacgctctaaaaatgactccggtaaatccacaagtttaattaattcctttgcacgcttatccttttcttctttagtccatttcaacaatttgggtaccaacacaatattctctttaatcgtcatatgaggcattaagccaatttgttgaataacatagccaatatttctacgtaattcaacaggattcatactccgaacatctttaccatcaatttcaatttgtccttctgtcgcttcaatcatacggttgatcattcttaaagcagtcgttttgccactcccactggttcctataaacgcgataaattcgcctgattgaatatctaaagagatgtcatctactgcctttttattaccagaataaattttcgttaaatgcttaatacttaacataatcatttctccttcctcataaaaaatatgacgaatgatacgcataaaataaaaagaccatcatcgcaattgttaaacaaatagagtcataagttaaacaagtacacatcatggtcttgattatgtagaattttatatttttcatctgtaatgtgaatacttaacagtaaacggcgctatgtatgttgaatttctaccgattactttgtttgcacattcgtatattcgacatttaaaactaacatactctatatgatgttattaaacattatcattttatcttttgcaactaaatagataactcatatttttcaaaagcgaatttattatcgctcaattggttgttttatagcaaaaaagtgtcgaaaatgtgaaatattattacaaaagtcgaatttttgtaataatgcacacgcatccattgttacaggcggataaacgtccatccgccactcacaaagtcatccttatattttaatatcttcatcatttattgtagacacccttgccttttgctaacagttcctactcccaagcctgtaacggcatttcaccgtcaaagtgttgcccatgacaggcacacctaaaaaacaaccaacagcatgagccattggttgtttcgtgtcatcttgtatgttgttgtataaccggtatgcttttactcattaattacttatcatgcatccctttaccttctagtatttggttaatatacttttcaacacgcttttgtcttgtttcactgcgtttagcttgtccaatatgatatatatattgatgttgtctgcctggcgttaatttataaaatgacgactctagctgtggcatttcttcgaacttagcttctaactctttaggaataacatattcctctgttttcttcatttcaacttttttaccagctttttcagctttaattgcttcagctagataatatttaatttcttcggtacgtgcttgaatctctgttaaattttcaaatcgtaactgacgagctgcttgcaccttttcagtctgttgaatgagtgtatgatatttatcctccaaaatggcacctttatgaaataatagtgcaacataatttttgaagccatggataagtactacatttttattattcaacgtgtaacaaggatgcatccatttatacgcttcctctaattctgtttcattaaagattaacgttctcaaatatttatattcttcttgccattgactctctttatttaaaaatgcctcaacttgttcattcgattgtttctcactcatagtcatcacttccattttatttttcaatacacattgtattatatatcctaattttataaaaaactaattttacaaatgcttttgcgttcttacaaaaaataaatttgactattatactaataagcgtataatttttcgcatactattttttgaattttcggcaataacgaaggagtatttatgaataaagacaagcaattgcacaacgacaaaatcaatctatcccaattagtcttattagggttaggttctttaataggatctggttggctatttggtgcgtgggaagcatcatcaatagctggaccagcagcaatcatatcatgggttcttggattcctagtcattggaaccattgcctataactacattgaaatcggcacaatgtttcctcaatcaggtggcatgagtaactatgcccagtatacacatggctcattattaggctttattgctgcttgggcgaactgggtgtctttggtgacaataatacctatcgaagctgtgtcagctgttcaatatatgagttcttggccgtggcattgggcgaaaccaatgaaacatttaatggaaaatggctctattagcacatacggattgctagctgtatatctcatcatttttattttttcattattaaactattggtccgtaaaacttttaacatcatttacgagtttaatttctgtatttaaattaggcgtacccatgttaaccatcatcatgttgatgttatcaggattcgacacttcaaattacggccattcggcaagcacatttatgccttacggaagtgcaccaatttttgctgcaacaacagcatcagggattattttttcattcaattcattccagacaattattaatatgggttcagaaattaaaaatcctgaaaaaaatatcgcaagaggcatcgctatctcactgtcaatcagtgcagtgttgtacatcattttacaaagtacgtttatcacttctatgcctcaatcaatgttacaacatagtggatggaatggcatcaacttcaattcaccatttgctgatttagctatcttattaggaattaattggctcgcaattttactatatattgaagcttttgtatcaccattcggtactggcgtgtcatttgtcgccgttacaggtcgagttttacgagcaatggagaaaaatggacatatccctaaatttcttgggaagatgaatgaaaaatatcatattccacgtgtagcaattatctttaatgccatcattagtatgattatggttacgttatttagagattggggtacgctagcagcagttatttctactgcaactttagtagcctatttaactggcccaacgacagtgattgcattaagaaaaatgggaccaacaatgactcgtccatttagagcaaaaattttaaaagtaatggcaccattatcatttgtattagcttcattagctatatattgggcaatgtggccaacaacggctgaagttattttaatcattatacttggcttaccaatctacttcttctatgaatatcgtatgaattggcgtaatacaaagaaacaaattggtggtagcttatggattattgtatatttaatcgtgctatcaatactgtcatttataggaagcaaagaatttaaaggcttaaatatgattcactatccatttgactttatcgttattattattgtggcgcttatcttctattacatcggtacaacgagttcatttgaaagcgtctatttccgtcgcgcaacacgaatcaatacgaagatgcgtgagtcactaaataatgaatcaaagtcatctcattaaatattttaaaatgcagtgccatatatgatttcaacacacacattaaccaaccattgatttcaacatcttggttggttttttattttgaaaatgggttataaataactaacataacaagatggtgaggaggctgggacataaatcaatgttctatgctctacgatgttatattgacagtagttgactgaacgaaaatgcgcttgtaacaagcttttttcaattctagtcaggggccccaacatagaagctggcggaaagtcagcttacaataatgtgcaagttggggtggggcccaaacacagagaaattggattcccaatttctacagacaatgcaagttggggtgggacgacgaaataaattttgcgaaaatatcatttctgtcccattcccgtagaagaacatcatataatgctgaaaatggtttgagttaaaacgaatatcaagctcgtctgattcagtcacaaaattgtcttgttatacttgtcacctatcatatatagaccgtggtatgattaaattggggatgataaaggaggttaataaatatgaagattaatactacaggtggtcaaattcatggtattacacaagatggtttagatatcttcttaggcattccttatgcagaaccaccagttcatgacaatcgctttaaacattctacgttaaaaacacaatggtcagagccaattgatgcaactgaaatacaacccatcccaccgcaaccagacaacaaattagaagattttttctcctcacaatctgcaacttttactgaacatgaagactgtttatatttaaatgtttggaaacaacataatgatcagacgaagaaacctgtcatcatttatttttatggtggtagttttgaaaatggtcatggtacaactgaactctatcaaccggcacatttagtacaaaataacgacattatcgttattacatgcaattatcgtttaggcgcattaggatatttagactggtcatattttaataaagattttcattccaataatggactttcagatcaaatcaatgtcataaaatgggtgcatcaatttattgaatccttcggtggcgacgctaataacattactttaatgggtcagtctgcaggcagtatgagcattttgactttacttaaaatacctgacattgagccatacttccataaagtcattctgctaagtggcgcactacgattagacacccttgagagtgcacgcaataaagcacaacatttccaaaaaatgatgcgcgattatttagatacagatgatgttacgtcattatcgacagatgatattcttatgctgatggcgaagctaaaacaatctcgaggaccttctaaagggcttgatttaatatatgcacctattaaaacagattatatacaaaataattatccaacaacgaaaccaatttttgcatgttatacaaaagatgaaggcgatatttatattactagtgaacagaaaaaattatcgccgcaacgctttatcgacattatggaattaaatgatattcctttaaaatacgaagatgttcagacggcgaagcaacaatctttagcgattacacattgttatttcaaacagccgatgaagcaatttttacaacaactcaatatacaagattcaaacgcacaactatggcttgctgaatttgcatggcatgatacttctagcacacactatcgcagtgcttaccatattctagatatggtattttggttcggaaacttacaaatattagcagcacatcaatatccaacaactactcaccttaaatttttaagtcgacaaatgcaaaatgatttagctaattttgctaaaagcggtaaaatgccttggccgatgtatcataatgaacgtcgctattatcgcacatatcaataacgttatcgcatctaaaaaagcacacctgaatttgatagcaggcgtgcttttcatatgagaattatgatgatttgaatgttttagcataatgattatttttcaatgtgaaaacaacgattaatcctaatgcgccaatgatggcactcgtatacgtgatagcttgaacagaaacatgtgtcatgaccaagcctccaataatgcctccaacaccaataccagcgtttaaactagacatgttccaactcattacttggcttgtgtcgccttcaacgtgttgaatcacaccgctttgtactgctggattagtactccattgcatgatattccatataaacagtcctgctaacaatagacctgaaccaggtaagattaaattcataagtaacatcatgacgataaaaatagaaacagaaatcattaaccaacgcttacttgtaattttatcggagaatataccacctaatgatgttccaataacgccagcgattccatttactagaagtgctaatgaaacgaatgacatatcatgaccattagataaaataagtggatttataaagacgaatgtcactgagtttgcaatcaatactaaaaacgtaataattaaatattttgctacttcagcaggtcttaatattttcgaagtaacatgattttcatgagatggtgcctcatgattcacagggcctcgttgtatttcctgatccttcggtaaatagatcatcatcaagaagccaacaataacactcacaataattaagaatagaaatgtatagcgccaacctactaaatcgccgataaccgttccaattggtacaccaaaaacattggcaccactaaaccctgtatagacaagtccaatcattttgccacgattttcaggtgctgataacatcgctgtaatagctaatacttttacgataattagtgctgctgctgcagatgagataattctaccaactactaatattgaaaaatttggcgctacagcaataatgccattaccaatgataaatataagtaatgtccataataatacaggtcttgatgaaaaacggttcgttaatttaaccagaataggtccacatatcgcaaatgttaaagcgtacattgtcactaattgaccaacgacagcttctgatacatgtaagtcctgactcatcaagttcataattcctgcaaccatcatttcaaccattcctactatgaaaatacttaaaatgaaagtaaataaacgcatgattgacattttaaaactcctttcaaacaaaatttccgatattcatttcccttagaatagcgatttattaaaaaatgtgtacaacacaaatttatttataaccgttctattatataatattttgctttaattttctgtccttaattggaaaattattgaaattgtttttcagtatttgaaaaattaacacaagtatgtcatttaataattatgtataattacttcagtttcaataatggctccaaaaaagcacgcacgctttatatgtcagtacagataactgactacaaagtatgcgtgcctttatgaatattttcgctgcactaaataataacattactatatgtgcatcacttcatttccaattaaaactaatgcctaaatctgatgcggtaaaatctatcatgactcactcttaacatccgtatttcgtgctactaattgatgtcttgcattgaaaaattgaccatagcttaaatatgtcgcaatcaaagcagacataatggtcgcagttgtatgaataaacacgactaacaattgaaatttaatcgcttgtaaaggtggtacgccaccaataattaagcctgtcatcataccaggaatcgacacaagcccatatgttttaactgaatcaattgttggcactatagctaaacgaatactttcacgtattgcacctttagaagccaatttaggtgtagctgcaagtgataatttagattcaatattagtaccatcttgtacgaatgcacgatctaaattttggtaagctaaattaattgcaatcaagccattatttgcaagcatgccgccgataggtataacttcattggctgtaaattgaatggcccctgtcgcaatagtacctgcaagcggtaatgccgttccaacaaagatagccacaaaggaaatcaaaaagacatggtgcatgacaggtgatgatcgactaatcgtattccatgatgcgtttacaataatgacaaatacacataatactaatagctatttgtcattaattttaaaaatatagtgcagtaagaatcctaaaatgattaattgtacgaccgcacgtactgtcgccacaatcaaatctttaataatatgtaggccttctttataagaaataataattggaataactaatagcaatgccgtcagtcctaatgccgtattactcatgttggttcaactcctctgtattagaaatttgaccatcaacaatggttatacgcttttgaaagtgtcgcatactttggtcatcgctgtgggtaatccacataatggccacgccttgatctgctaatttaaaaatgatattttctattttttctttattattaatatctaacgcacttgttgattcatctaatagaaggatgtctggggtatacattaattggcgtgcaatcgcgatcctttgacgctcgccacctgacatatgttctattttagaacttaattgatagtgtcctaatcctacatctttaattaattgcttagcacgttttttatcaaatttatcattacgcgcaagagacggaaaaatcatattgtcttcaatcgtttcaccaaacaaatcgctttgttgcattaaatagctaatgtgtcgacgtagtatttctggttcgtaatcatcatatggtttacctttaaagtaaagcgttccactggttgggctaattaaattacatattaatttttgaaatgtacttttaccactacctgaaggaccaataattgcaatggtttcacctttatctacttttaaattaatatgatttagtatgactctatcacttgcctcatacactaaatcttttatctctaacaacatatttacccctcctcgtatcatgagttattttgatataatagggtaatccttttcttgaatagtgtgcttacctataagtcgacctagtcaatgcttattaccccttaaaatcgctctaataaaacatatcaaatatagtattcccatttttgaaaaatttagtgccatttcattctggaaaatttttttaatatttatgtaaaaattgaagtacactgcagtgacttagtctcatctttttaaaaataaaaagcctttaacatgacatctcatgctaactaagcatctaacttagttcttgcatgacatcatattaaagactttctttattatttgtggatttgactaccacatgatatttttataagtttcatcattcaatgaacggacaatttcagtaacaagacggacagaattttcataatcatctacattgagcactgaaacattagaatgcatgtatcgcagcgtaacaccgattgtcatcgttggaataccttcatttgcgacatgaatacttcccgcatctgtacctccacctggtgtcgtatcccattgtacttcgatgttatgtttcttagctacatctttaatatgcttgcgcaaaccttggtgcgcaatacttgtagcatccatcataataacaactggaccaccgcctagtttactatcgctcgtttgacctgacatacctggtgtatcataagcaatacccacatcgacggctatcgccaaatctggtttaatcttattcgctgccactttcgcaccacgtaacccaacttcttcttgcactgtggcaccactgtataagttaatgccaatattttcatcttttaaacgttttaatacctcaacagctaatgcacagccatagcgattatcaaatgctttcgcagttaaatatttatcatttgtaagcacttcaaattcactatatggcgtaaccatattgcctacttcaacgccagcttcttcagcttcttccttgctactaacaccaatatctataaacatatttttgatttccattggctttttacgttcttcaggcgttaagacatgcggtggtttagaaccgatgatacctctaatttctttacccgaatctgttgtaatcgttactttttgagatagcatgacttgattccaccatccaccaactggcgtaaatgaaataaaaccatgtttatcaatctttgttaccataaaaccaacttcatccatatgaccagaaatcataattgagtattgaccattctcagcatttttctttccaaaaatgccacccaaattatcttcaataatctgatcactgacaggctctatatagttacgcattgcttctttaacttgcatttcataaccagcaatgccgtttacatctgttaaatgtttaagtaatttgactgactgattcatgttattcatcctcctgtatttcaacttaaaactattgtatcactaactttcagaaaaacgttccctaccgctttatcgttttcatgctaaaatatttttaaaattttgtgagaaatacacttaaaaaacctcatatcttcaaaaaaaatgacaaaatttaaatttttgaataacatcattttttagtaaatgttataatttctttataatacaaatatcgaaagaaggcgactgactttgaaaaaattatgttcattaattgtagtagcattagtttgtgtcattgcattatcagcttgtggtaaagaacaaaccaaaacatatgaaggtgatgttagtggtaaacatgtactaacttctatcacatataaagatgataaagttttaaaacagtctacaatcaacacaattaaatatgacgatctaggtatggataaagacgaagccaaaaagttattcgccaaatctgaaagtattttcaaagaccttaaaggcgtaaaatacaaagtagactataaagataaaaaagcaattgaacacttagacatagattacacagaagttgacatgaaaaaattaaataaacgtcttggtgtttcaactaaagaaaataaagatattagttttgaaaaacttgaaaagcaattaaagcacagaggtttaaaagaaaaagataaaatggacgacaaatagtttataacataaaaatgccctcagataagactatggttacaaaccttaattcatattctgagggctttaatatttgaaattcttgtgtgaccagcatccactactaatataaaattatttgcagtaacgctaaaatccgctgctttcattttcccgaaataaataagttaactaatgagttttaatttataatcatgtatcgtttgcaattcaccatcgacttttcgatatacaatatgatcagcagtaatttctgtagggcttgatacgccaacagctgctgcaatattgaataagccttcatgcaaacttgttacatagtttgtaacacgatattgcttttctccaacaatcaatgctttttcttttttcgcatctgtcgttgcaacacctacaggacatgtattcatatgacattgttgactcataatacaaccgacactaatcatcatcccacgtgcaatattaacaaaatctgcacctaaacctagtgcaatcgcaattttatctggtgttactaacttaccagatgccgccaatttcactttatctcgaataccatatttttctaacatgccagacacaataggtagagctgtaaatagcggtaagccaacaccatcttgtaattcttggaatgttgcaccagtaccaccttcaccaccatcaatcgtaataaagcttggatacttatctagttccaccatcgtacgtacaagtgtttcaatttctgaaactttgcttactacaattttgaatcctactggtttttgacctaattgctgcaactgatcgacgaaacgaatcaaatcttcagcattatgaataaattcgtaacggttaggtgaattgattgttttataaggttcaacatttcggattttagcaatttcttcgtttaccttttcagcttccatatgaccaccacgagtcttagcaccttgtgccaacttcagctcaaatgcgcgtacgttagataactgtgcaacctctttaaataaaccttcactaaaattaccttctttatcacgaacaccaaataaaccgggaccaatttggaaaatgatatccccattaccttttaaatgatattctgataagccaccttcacctgtattcatccaagtgcccgctttagctagacctttagataaagctgtaatggcattttttcctaaagcgccataactcataccagattgtcctacgatacgttttaaaataaatggatgttttaaatgttcacctaattttattgcatgatcatcacttaagtaatacggatcaatctttgtcggtacacgatattcttcacgactaaataaacgctcattcgcgattttataaatgaatgttgataacaatgttgtattatctactgaaatctcattacgttgcatcggaaacattgtgttctgtatgtaaaagccgtcttgataatctttagtagtaccgaagctggtcatacgagagttatattttccagccaaaacgatatttttataatcattacgtgaaaaaggtttcccttcattatccccagaaaataaatactgacgtaattccggtcccattttttctgaaatatatctaatacgtgctaataaaggataattccttaatacactatgttgtgattgtcttttatctttaattaaccaaataagcccgataacaataaccgtaagcatgaatcctacaacgataatgttaactataaattgcatgactgtaagaaacgtcattacaatccctcccccaaaatttcaattcaatatttatgatacaccttacaaaataaaacacaatggaagcgcttcattttataaaacaattttttgatatgattttcattttaaattttaatgtataaaacatacaatacaaagtaatatgtgctaaagtatctatataatacaactaattaagaggtatactatgtcaaatacaaataaacattacatagaagaagaatacgctaccgaacaatcgcgttttttcaaacgtgatattggatttattttcctttatatatttttggttaacatcttgccaatcattatcgtctttttaacttttgggttagtagctgtattcactcaacaagccccatggggtttctcttttcctatttcaatgaacattagctatttactcgcagttattatttcactagctatttttcgtcggatgcatgaagatgcgtttattccgatgatacgtacgcaaatcgttgccagtgctaaatataaatggcatattcttatatcatttacattaagtatcgtactctttttacttttaaatcatttcgatattttcgcactaaatgtagattcctttactgtctttgacatttacccgctcattagagactatggttccatcagtttaatagctatattttcgttaaccattatattaaatactttgatttgtcaacttattttccgtcatattttaattcaagaattaagcagattaatacctttaaagattacaatagtattatccgttatccttgaaacactgtactattatccatacattaatacatggtgggaattcattccagcattgatactagctagtagtgcgacttacttatatttaaaatcaaaccgtaattttatggtgagctatttctatcaattagcagttatactcgttttgcatattttcatgtaaaattttttcagagtattatccattatccatacacatcaaaaagcacacttaaaagtcagtatcacaactcacttttaagcgtgctttatttagatatactgtcgttctaaaaacgagccatatagaatgtttcatgtcctagcatgaagcacatgaatcgccatgctcaatataccttttaaaatttaaatattcattaacttaatatgctttaattcacttcattaaagactatttgctgggcgtggtgttggttttttcaataaactcataatcattattacaatgactaacataccacaaattagatacatccatttaaatcctactaaatcggaaataggtcccatcaatgcgccacctaacgatatacctaagtctgcacaggcaataaataaacctaacaacatattacgacctacttttggtaagacgaaacttaagtatgatgttaatgttggatacaccatcgcttgtgtcattcctattaatattgcactaccatagaaaataattgcacctacttgcggaccaaatgccactacaaatgacgcgatcactaataatgatagtacagataccatatatttaggatgccacataccatctgacggaatgtatttccttaagtaaaatcttgctgcaacaactgcgattgcttgtatagttaaaaagatacctgcattcgcgaatcctaaactcactgtgtataacggtacaaatgtactaactgcaccaaatacaatcgatgcaacaatcatgataataccactgttcaacaactctttatttttgaaaaattgcgcaaaaacagttacagcgttaaacggcattttttcaatcttatctgacgtatcgggttcctgttcagcaaaggtcacgcgatagccaaagaatgttgttgttaatgcgataaagataatgacaattgcaaatagtgaaatattatttgcattccaaatacctacggcaactaatggtccgattaagtttggaatcgttgaaaatagcgagtacaatgatacaccttcagaacgatgttcctctggtaatgcatcaataatacctaactgtaaagacatagaaaagaatgccgtacacacaccttgcataacacgtgctacgaaataaccttctaagccagtaaaaccataaataattaaagctatggcattgataatcaaaataattcttaatactttaatgggaccgacacgagcaataatttgtcctgcccatggtcgaaataccattgctgttaacatgtatgcccccataacgataccgataaccgtattcgttgcgcctaaatcatgccctcgtaaaggtataaacacgtttaagattgcattggcactaaagaacatcaatgttaatatatataatctcaaaaagggccaagccattgcacctttcattatctcactccttagaatgatagttgtttttctattaattctcttgtataagcattgtcacttttatgcaatgcgcttgtcggaatttgttcttctatttttccgtttttaaaaataattaattgatcacataaatacgtggcagcttgaatatcatgtgtgataaaaatataactcaactgacgcgtttcacgtaaatgaatcaataaatctaatatttgtgtttgaattgacatgtcgagtgaactaatagcttcatcaaacaaaatatatttagggttaatacatattgcacgcgcaatcgcaacacgctgtgcctctccacctgataacatattaggatatttatccatgtatgccttagatagaccaacttcttccaacaatgtaattgcttggacttccataacatctttaggttgtccatcacattgacacatcacttcaaataagatttctctaacagtctgaaatgggtgtaatgatgacgtataatcttgaaataccgcaccaatttgatgacgtctcactttcttcttatgcatcggttgatcatttaaggttacacaacctttatctggtttctcaatacctaatatcatacgactcaacgtcgatttaccgctaccactttctccgataatcgcaatcgtcgcaccgattggacactcaaatgacacacctttcacgataggtgttcgacgacgcttaaaaacatgtgcgctttgatatgacttttcaacatctttaattttaatcatgtacatcacccctcatcacatgtttaaaatgatcattaatcttcttcttagtggataataaatacttcgtataaacatgttctggatgatgcaagactgattcacgcgtaccatgctcaatcagttgaccatttttcatcacaacaacacggtctgcaatcttgttaataaccgttaaatcatgtgaaatgaaaatcatcgcacagtcaaagtgttttttaatatctataaatgcttccagtacatcatattgtgtaattgtatctaaagccgttgtcggctcatcagcaatgattaacttaggttttaaagctaaagctaaagcaatcattaatcgttgtaacatccctcctgataacatgtaagggtatgattttaatatacgtttaggatctttcaaacttaaataatccatatattcaattaatgtcttttcaatttcttgtgtagacattgacgtatgtactttcatggtctcaaacatttgtttaccgacagtagttgatgggtcaaaggcacgactaccttgttgcatgaccatcgcgatatctttaccacggtattttttcaattgtgcttccgataacgacaacattggcttaccatcaaaggttatatcacctgttacgcgtaatcgttctggatttaaacctacaatcgatttgcatgtaattgatttaccgctaccactttctccaataacgcctaaagtttcacccttagttaatgtaaaattcacatcactcacgagtgcttgatctgtccaggtatctgtaatcgtcaaatgcttaactgttaacaatgtcatgattgcaccactccttttttcacagaacgaagtttatctttagaagagatgcggggatcaatggcaatttgtaaagcatcggataagaagttaaatgccatcactataatcactatggcaatacctggcgcaaacatcatttcaggatgtgtaaacatcacttttctagcttcgttaagcatcatgccccactctgcagtaggcgctttgacacctaatcctaaaaatgaaaagccagatatttgcaagatcattgaacacatcgaactactagagatgatagcaatatctgctaatgttaacggcataatatgtttgtgaataattttcatatcattcataccgattgttttagcaaatcttacatggtcagaagcagtgtactgcataacacttgtacgtataacacgacagaaccatgcccaacgcgtcaaaataaatgccatgataatattttcggcacccataccaaacaatgcaatcaatgctaacgttacaacataacttgggaatgccaacataacatcacacgcacgcatgattaaggcgtcaacaaacccttggaaatatcctgataagaatcctaaaatagatccaataagtacagaaacaaatagcgcaacaaagacatataacaaacttggtctaatcgcataaattaacctagttaaaatatctctacctaaatggtccgtacctagtagatgttgaaaactcatgccagcaaatttgtttgctgtatcgatatggttaggatcataaaatgtcacaagtggtgctgctaatcctaaaaagacatataatacaataatgcctaaagcaatcactgcacccttatcttgtaataaacgttttaaaattatcatcgtgcgccctcccttaatcttggatttaatagcgcattaatgatatctgctaatgtattaaatacaataaataatacagctacaattaatacatatgcttgaatgactggaaaatcatgttcaagtattgcttttaaacttaattgacctagtccaggccatgcaaagatatactcgataacaactagtccacccattatcattggtatagacatacaaaagattgataccgcaacttgtaaagcattacgcaacacatgcaacattaatgtgatagatttcacaccgcttgctcttaaataaagtacataatcttcatttaattgttccaccatcgagcgtctaacatttctaaagtaaataccagcataggcaatcgtaataacgatcactggcaatatgtaactttctggacctgttaatccagaagtcggcaatatgtttaacttcactgaaacgtaaataataagtattgaagctatccaatatgatggtaatgcagttagaaagaaagccactgaacgtatcgcacgatcagtgaactttcctctttttaatgcactaactacacctaaaataattgatgtaatcatcaccataacacttgaaattattgttaatttcaatgtattcataaatgctggaccaatgcgttcagcaacaggatcacctgtaatgtagcttgtaccaaaattaaattgcatcgcttcaagtaaccaatttttatattgaattaataatggatcgttgaaaccgtacttctcattcgtttctgcaatcaactctggtgttacatttggcgttccttgtgcatgtaaaattgtcacagctggattttcatttgtaatatacgtcaatagaaatgtcataaaacttactacaatcatcaatggaaacatgagcgcaatacgttttaagataaatttgaacatctaaacgctcctttatttatactgcatttcattgaatggtaattcatactgtgattgtgtgaatgatactttttctaaatctttcggcgcaacaactgtcatactaccgtgtgaaatagggataaagataccttcatcatcaatttgtttcaaaatgtttttataagcgtctgaacgctctttaccgttttggattttaaatgcgtcatcaatgctgttgtatattttatctttgttctcaatgcctgatgttgcactttcataaccatttttcgctttaaatgctgcaatcgtactttgtggatcgtacaataatccccaagtttggttgaacattaagtcataatcaccagaagtacgacgttcagcaattttatctgatgtttcgccattgatgtttaacttaatacccattttcttaaattctgcttgtaagtattctgcttgttctttttgacttgaagaacctttgtcatagtacattgccatttcaaggtttttaccatctttttgacgaacatcgctgtctttacctttcttccaaccagcttcatctaataatgattctgcttttttaaggtcatacttacgtgttggcatatcgaaattaatgtctgttacatttttcgcaaataattgagttgctggtttttcttgaccatctaaaatttctttggcaattttatctctgtttaccatatgaccaatcgcttgtctgactgttttgtcactgacagcgttatcttttttaccagaattgacaactaacattttcgtattcataggttgactacgcttaacttgatagtcacctgtatctttcaattgttttaaagagtctttgtctaagctatctgtacctctatcatctgtgaaggcaaagttcgtttcaccttttttcattgataggaatgctgtttcaccagcaggcattacttttgcttgtactttgttaagtttagacttttcgccccagtattgatcatttttgttaaagtctgcagactcatcttttttgtgttcacctaatttaaatggaccagtaccatcgaactttttaacgccatcttttgttgtgccgtttttaaagtcttttggagacacaaatacatatggacgaggcatcgctaactcagccaatgctggttgatatgcttctttcaaattcaattcaaccgtgtacttatctttaactttaacattgtcaattaatgttgaaatctttaaccaagaatgcaattttttgttttcttgaactgcgtcaatatttttcttaactgcgtcagcatcaaatggcgtaccatcatggaatttaacgtcatctctcaaatggaacgtgtatgtcttcccatcttcagacacttcccattttttagctagtaaaggcttaatcccatctttcgtgttacgtacaagcggctcgtatatcatactttcagcagacatcgatccaccgtaaacatgcgggttcatatccccgatatctttaaccgtcgtatacgttaattgcttattctctttcttttcttctaagcctttattaccaccacaaccagttaaaattagccctgatgcaagtaacattgcactcattttagttagttttctcatttgcttttcctctttctaaattgataagttgcattacttaatcaaatcgtaatgattatttttctcaattatttgcttatttttatgtaaatgtcaaacataattcaataatttttttctattataaaacttcaaacccttattatgaaagcgttctattgatttccaaaaattttgtgacgagtgccttatcttcttcaaatagatttgtattaaattgagaagatagttgttgatcttcatgtgtctcattgtacgcctggcaacttgcttcatagcgagttaggaactgatcaatcattggcgttttgatacctagcattttcccaatatgctgaatcatcgccgttctgtaataatcctcactcggcattcttggaatttgaacaacatcctgttcatttttatagacttgcttaaatggtacagctgaaaaatcaaagtaatgtccgttttcgtctggctgtgaaaatggatcaatgaggattgcggtatatcttacataaagtagatattcttgtaagatatctggcaagatttcgaaatgctcaatatcaccttcatccaaagtttcaggacgtactggataattttccttcaccataaactgaagcaggttgactgacggcactctaaatgcttgtaaaatagccatcatttccttccacattaaacgcatttcacggattagtgtcatcgttatcggtccttcaggaaataacttatacacataaaccggtacatccgttccttcgaaaatggctttcaatgaaaagtcattcataaatagtggtgggtgcacataaagcgaactgtttcgcgtttcagcatgcagtggcgattcaacgacttctaattgaatcttcaattgctcagctaaagcagagattcgttgacacattgttgagtttaaatgtgtcgatcccatgtacaatttcttttttacacctgttgtcaaaacgtggtttggcacttctttatcgagaatacgtgtatcgccaagatacgttgaaaatgaaataacctcgatatctttattaaatttagacataaattgttcgacaatcatttgcgaaccaaatgccggtgatattagaatgacatgtttcacactctgcaatgtttctaatgataattgttgtaaagtgtcatagtatgcatctgctgtgcatgccattacaatcgtgtcgtattcaccttttacatttattacatctttatataagcgattaatatcaaatttaccttctaggtgtctatgcgcctcgttttgtactttaacttcaaatcgcttttcttttttatacgctctatataagcgttttgatttttctgatgttgaggcacgtccaaccatatcaatctcataatctgattttaaatagcaaatattcgctaattggattgcgaccggaccagtgcctatcattaataatttagacatccgtaatacctacctttatagctgcttttttataaagtgctatatcaaaaatttgctgtggtctcatatgtttattcacacattgccacttaccttccgctgtttcttgtgacggataattaaatattgctttgatgccatcaccaaagcgcattgcaactacgacattttcatttgttaaatcatataattcttctaaaatgctgtactttaaaggaattgtcgagctgaatatgatatgcgtcacatctttgatatctttaagttcagataccttttgatccgtaattgttatatcttcatttggtgctaagacgttaacgattctgcgtcctaggtcaacggcttgtggatcaatatcaataccgataactgaagcacctgtttcttttgctacttgaattaacgtcattggatatgcacctgaaccaactaacaataatttgtcattgctagctatactacattgtccaaactcttcatcaatacaatgttctatattgtcaaagtaacctgtggtagacgcctgtccgtctaatagacgtctagctctaatgacttccacttgtttaacacactgcgctgtaatatattgcagtgattttattaattgtgctttttcttcaacgtcacgccaagcattaaattgttgttcataaataggatttaaaataaattcactatagtcatccatcaatgtttctaatgcttcgatatattgatcgtcttgtaatacacgctcgtaatgcgcttcaaacttttctaaatattgttgtaatatcaatttgatttcattattaaagttattcattgtaggctccttattctatatatgcttttcctgttgctacagttgtaacctgtcctttaattgaagtttgatatcccaattggtgacatcgctttgatgtcactaaaatactgccccctggctgatgtactgtaaaatctttgcatgcgtcattacgttgataattattaaaaaccccaattgatgctgtaccagaaccacagctattttcccaaattaaactttggatttctggtatatagattaatggctgtaaaaattgacgttgttcatcaaaaagcatcatacctactgttttatatttgtgattccattgttgctcacgcacatatgtttcaaccaaatgttgaatttctgttgttacttgattaactggaatcacataatgtacatatgtttcataaataatttctattgctttccatgaatgattacccatattaattgttgttggcacaacacgatgggcttgtggcatttgaacttcatagtattggcaatcatgaattgcgcattgcactaaatccgaacagccagataccttcaccttaaactgttggtctttaagcaaatgactttcctgcaaatgatgtatatatgacatcgttgcattaccgcaaaattcattaccgctcataaccaagtgaaaatcattgccatcatcattttgtgttgattctataaagcctacctgttcacaacatacatgtgttgcggccatcaactgattggcgatagatgcatattcactagcatcatgttttgaatgaacaagtatcgtcatattccccgaaggattatacttagaaaattctataacctgccgattcatacgacactcctttagatgtattttttagagcctctgtaattttaattactagaggctcttatgcagttgttgcgaagcaatcaactgtattcctctagctcttttaccttaagtgattttttagaagatgaacctaatagtttcccatctattaggtaagtcatgctaatccgcaaagtggaaagcatgacttagtaatcggttgttgcatcaacatgcaaccgtaaaccttatttaaagttgcttcttgtggctctacaagcgaatgcagttgtccgttaacttcattcacttagatgcttttactgttttcacctcaactaaaacttcaaaaaagttgcagaaaacaaatcgtaactattacgatttgattatatactatattagttgagaatcattgtcaataaaggttgtaaatgaatgctcatttatattttttgaatccctccataaacatcgcattctcagcacattcaagtctttttgaaaatttttatcaaacaaaaaagccagcttcaacgtaaaatacgttaaaactagctttaagcaatacacttcatcaaataaacaaacatttatttttcaaaggttaataattccccgtcatttggtacaacaactctattacctaagtcgttagaatttataaattcattcagctctttacgagataaatgccaatgattgaccgcttccatatgcacaacaactatttgagcaagcggcaatgtatgagcaacttttaacacatcatgttcatccataactaatggaccaccttcaaagaattgatttgcaccaccattaagaacaacaacatctggttgatatgtttttaatgctttttcaaccccttcaaaccaaactgtatctgctgctaagtataatgtcggctcttcagaatgttttaaaatcataccgtgaacatgtcctgtcattttcaaaatttcaccatgaccatgttgagcatctgttttaaccaactcaatttctccaatgtgtgtcacatcattaaatacagaaacgtttgtaaacccataactctctacttcactagcatcttcttcattttgtgcgtaaattttaatatctttcggcaatacttcaattgctttcggatcaaaatgatcaatatgcaaatgcgttaaaatcactaaatcgatgtcatttacaatgtcttcaattgccataggtagttctacaagtggattgttttcttcttgtctcggtgaatttggaaatggttcaaatgcgcctttgtcacttaacattggatcaatcaaaatgcgtttacctccatactcaatcacggccgtggcatttcttatatgtctaatattcatgttaaatccccctatttcatatgtctgtcattgcgacaatatgcatacattgcctacttcatgccaaattattttcctctggatatcgattttaaaacaattattccaatgtccgcttccacgaatcatcactcaacatctcgccaggccatgtgtaagccataacaccgccatcaatgcgaattgtttcaccagtaataaatgaactctcatcagatgctaaaaagacaacgagcttgcctacttcttctggtttacctaaacgtcccagcggtgtcatccatttctgattttctctaaacgctttgccttcctcatcttcgctagtacctgtcagtttatctactaacggggtttcaattgtacctggtgcaattgcattggctcgaatgccatcacggccatactcaattgcgattgattttgtaaaatttatcactgcacctttcgcagcattatatccagagcgatacaagtctgctgcttgtccggaaaatgaagacgtgttaacaatagagccaccttgagtcatcattaaaggtaacatcattttcgtcatcaaaaatgttccacgcatatctacattcataatcttgtcatacacatctaacgggtattcatgaattctacctgcagcattgtcaacgcccgcattattaaacaacacatcgattcttccaaactgttcctttatgtcagatacaaagtctaccacttgttgttcatctgaaatatccacattatacgccttcgcattgtcaccattacttttaatcttatctacagtctccgataccgcttcagctatgtctaccgccaatacatatgcaccttcttgagctaaagcgattgctgaagcttgaccgatacctgtacttgcccctgttacaactgcaactttattttccaaacgtttcattcagtcactcctatacaacatatcttaaacttacagtccttattttccactgttcgatgcttcataaacctaatagataagtctccaggcagtcatagctactctctgctatacaatttctattgaataactcaaaatatttaacaatattagttttttattttctgaaaattgttacttttgagagtattttttgttacactttaaatatttaacaaagggggatgaataattgatgacatctaaagaaagacaaaaaggctctatcgtcaatagtttcttaaatagtgttgaaaaaattggaaataaattaccagatccaagtgtattattctttttaatgtgtgtaggtctagcaattttgacatggcttgtctcactatttaatgtatccgttaagcatccaggtacacatcaaactatccatgttaaaaatattttaagccatgatggttctgcgatgattatgaatgatgccataaaaaatttctcagaatttcctgcattaggtttagtacttgctgttatgattggcattggtgtcgcagagaaaacaggatacttcgacaagttaatgatttctgttgtgaatcgcgcaccacgtttcttaattttaccgactattattttaattggcattttaggaagtacagctggtgatgctgcgacaattatcttgccaccgcttgcagcaatgctttttattaaaattggctatcaccctattgctgggttaacgatggcatatgcttccgctgttggaggatttgcagcaaatatagttgttggtatgcaagatgctttagtctattcatttacagatccagcaacacgtatcgtttcagagtctattaaaacaaacgttgctatgaactggtactttatcgcagcgagtgtcgttgtattacttcctacgatattgctagttacaactaaactgattattcctaggttaggtcaatatgatgatcgtttaatgcatgatgatcatgaagaaacgtcttcacatattactgacaaagaagcacatgctttaaaatgggcaaatatcagtttcatagtcacaattattttattaattattacagccattcctgaacatagctttttaagaaatgctaaaacaggtagcttactagacgatgcgccattaattaacggtgtcggattaattattcttgttgtatttttagtacctggattagtttatgggattttaagcaaagaaattaaaaatacaaaagacttagggaaaatgtttggagaagctgtaggatcaatgggtacatttatcgttatcgttttctttgcagcacagctactcgcgtttttaaaatggagtaatttaggcattattgctgctgttaaaggcgctaaattgttagaacatcaaaatgggattgtactaattttaggaattattattctaagtgcattagtaaatttattaattggtagtgcatctgctaaatggggaattttagcacccattttcgttccaatgctcattattgtaggatttcatcccgcatttacacaagtcatttaccgtgtaggcgactcgattaccaatccaattacaccgatgatgccgtatttacctttattattaacttatgcacaaaaatacgataaacgcatgaagttaggtgctttactttctagtttaatgccgtattcaattgcgctaagtattgtgtggacagtatttgtcattatttggttcttattaggtatccctgttggaccaggtggaccgatattcgttaaatagcagtttttaaagggataaattaaaatgccactatacaagatttgacctgtatagtggcatgatttgttatgatatagcgttcgagatgaaactctgcatttatatgaacaattatagtctatcactaataatatttagtctgttccaaccgttaatttggtttacaacaaagacaagatcaataatttgttcttcatcataaaatgattttagccggtcaataatttcaaacttcttaaagtctttgattgaatttaacatttctgcaaattcaagcgtcactttttcttgatcagtaaataaatctaaatgtctaaaactcaatacttcatcaattttcatttgtgttacacccaattcctttaattcttttttatggatatcaacacaataatgacaaccgttaatttttgaaattaataacttaatcaatgcactaagttcatcattaacgggtgattgatgaataaacttttcaccttggctcattacagacattaactctccattttgtttcttgtaattatacggcatttgcaatctctcctttacattgtttaataccaatccagtgatactacacttcgaacaatattggatagaatttaaaattctgtataacatcttgtcaatctgtgctttagttaaaacatttagcgcttatatttaaaaaatatataaaatatgaaaacagattgaaaggatattataccttgctctacccttttttataaaaaatcacacacatttgagaaaatttgataatgtcaataaatcacgtcatcgccattgttattcagtatataatgtttttataatggccaaactattatttcatttacattaatggggttcacttgtgttaatgtactgtaaaaaactggggaagtattagtgatgatgaagtgattgatattaattgcgaaacaccttcgatagcaatgacatagattattggaagattaaatcaaaaataaagaagaccctagtggccttcttttttatctaattcttctttgatttcgtcaggtgattttaattgatttgctggttttagtaattcacttaatttttcactttttatcatatctccaccaaattgataattatgttctggagacccatatgcaacaaaatcatcttttttgttttcattgatgtaaccttcaattacggcatcgcccataggtcctgtcttcaaacttgtgaaatgtacagatttcatcgtgttcggttctttagtgttatgcttgagataaagtgtaatgcgcgcttgttgttctttataataaattgatttttgtttttctttttcgtcatatttcattttaaaatgtatgaccgtagcgactatacatacgcataaaacaacaccaataattacaaaaacatgttttttggacatttaaccacctccaacttttagtgactcttctttttgtttagctctttttttatatcatcaggcgattttaattcctgtgctggctttagtaactcgcttaatttttgactttctatcatagcaccaccaaattgataattatgttctggtgtagcataagcagtaaaatcagcttttttgttttcattgatgtagccttcaatcacagcactacccataggacttgtttcaaagttagtgaaatgtacagttttgattgtgtttggctctttggtattatgcttgagataaagtgtaatgcgctcttgttgttctttatagtatattgctttttgtttttctttttcatcatatttcattttaaaatggataccagcaacattaattaatatgattaatataatactagttaatattaaaattttctttttcgacatgtatcaccagctcctaatgtaagatgggaaatgaaaattttttatagttctgtaataattaatgttatagtttataaatcatagtaccactatcgtcgtatctaacaacgtgaatattagaattaactattgatgagaattgaacgatatgatattccgcttctataaaattcgacaccctactaacataaatatcttcgatagcaaacgatatttaacatgtacaaatcaagctaaatattacgtgaaaatcactgtttagtgtttttctttttgtttatttcttctttaattttttcaggagattttaaattttcagcgttctttaattttcctaaaacttcattacttcctgtcaatcctccagtgaattgataatgatgttctggtgacccatatgcaacaaaatcagcttttttgttttcattgatgtaaccttcaattacggcatcgcccataggtcctgtctttaaacttgtgaaatgtacagatttgatcgtgttcggttctttagtgttatgcttgagatagagtgtaatacgctcttgttgttctttataataaattgatttttgtttttctttttcgtcatatttcacttttaaatagatacctgcaacactaattaatatgattaacataatactagttaatattaaaattttctttttcgacatatatcaccagctcctaaaatgtggtggaattttatacagtttacatgattatgatactacataacacgctcttaaaaagtaaaagtagctatttagtaatgaggaaatactatatttaaaattgtatgtttatatcaagctaagtttaacggattaaagggagcaggtctatcacctgttactaaaacttatagactcaaaaccaattaattgtatttaatatttgcagagacaaattcgaatcacttgttagacttcgagttttattctgtcgaagattcaaatacattatttgataaacattaagcaattaaaagtgttgatataaagttcatctaagatcatcgaaatattgcggttatgaagtggttaacagataaatacagtgaaaattgtactaaaaattcaacttttcatttttatgtgtaagtatgattaacttgaaagcaaaattaaaacgaccgcatagttttagcggtcgttctttttagactctaattccttttttatctcatcaggtgttttggtttgatgtgctggttttaataacgtgcttaaatttttacttttgatcaaacttccaccaaattgataatgatgttctggtgacccatatgcaacaaaatcagcttttttgttttcattgatgtaaccttcaattacggcatcgcccataggtcctctttttaaacttgtgaaatgcacagatttaatcgtgtttggttctttagtattatgcttgagataaagtgtaatacgctcctgttgttctttatagtaaattgctttttgtttttctttttcgtcatatttcacttttaaataaatgactgtagcaactatacatatacataaaataacaccaataattataaaaacatgttttttgttcattaaagtaactcctaaaatgtgttggaaaatgaaaatttgtttgcaatctgcaattatgaacattatagattataaatcataacactaatatcatcgccttcactcactcgattattaaaatcaccagttagtgaaaattgtgcaaggaataattgcctatcatgcttttatatcattattgccttactaatattaacaaaaccgatagctattacattaaatgtctatctcccacacctcaaacacatttttatacaggacgcactgtaatttcattcacgttaacgtgctttggttgtgttaatgcatataatactgcttctgcaatatcttgtggttcaagttttttacgatctgttggattgtatgcggcagttatggctgtatctaccattcctggagaaatgcttgttactttaacgcctgtctttgccaactctttttctaatccttgagtaatagtgtgaactgctactttcgtcgcactataaatcgtactacttttcgttacttcaaagccagaaatagatgcaatgttaataagatggccacttgattgttctaacatagttggtaatgcagcctgtgccgtatataaagtgcctttgatattcacatcaatcatactatcccactcatctacttgataatcagtaatcttagacgataacatttgtcccgcactattgataacaatatccaaaccaccgaatgtttgttgtgcaatttttatcaattcatcgacttcttcttttttcgttacatctgttggcactaccttcacactatcttgagctaattgattcgccacattttgtagtttatctttatttctaccggctaagacaactttcgccccttcttcatgtaataatgtagcgattgcttctccaataccactacctgcacctgtaactagtgctactttatctgttaatactgtcataatgatcgactcctttgattctttttattttttcagggtaaatcataaatacatattacttttaaaaagcgtatcacaattcatataacggtcataataactcgcttcattttcatagataaattacattacaagccattcgaaacatacaattaatcgttgcttatattttttatttttaaaaatgttgaaaaatcgtcacttctttattgtaaaaacattatattagtactaaagttaatactgtgatttatcattcgattgaatgattagagggaggaataaaacgtgacatatcatgagcgtgttttagcattaagagcagaaagtaaaagaactgcatttgattttcgattcgaagatttatttagcaaagaagaatggctaagtatgtcgcttgcagaaagacaaaaagctgaaaaagcatttcgacacgaagttaaaaatatggacgatgtaagaatgcccttctcaagtgtccatgacgcccaagtaaaattatataatgttatatattcttataacggcattaaacgtaattttaaacaagttgaaaatgaaggattctaatatcatttcgtttatatatagcagacatgatagaattttatatgtaaatcttgtaggtaatcgttttaaaaataatataagcatgactaaagccacatccaatataggacgtggcttttagtatcgttccagatttgtggggagttagggtttacttaattaaaggggtctgccctcaattgctcaccaacgagggcaagttacatcaatcacacttcaattgccgccgactaggggtagtaatcattggcaataagaactagttagtgactaacgatttacgttccatagcaaagtgatacaaacgctcagcatcaatgtaaggcatagaatcaatagttaggtaaccatctttgatgtcaccaatcaatccttgatttacaccagtgttcacgtaaatatcatagctacttacgtctgagaaaataagcgcttcaatctcttttctcataatcatcactccaatgtttatatagtatttatataaactctctcgtctctctctatttattaacttcttacaagtctaatattacatgaatttccaaataaataaagaggtttgtgatgtatttcacaaatttatcactattttggaaaattaagaaatatttaattatataaaagtttaataagtaagaaaatatgataaaatgtagatgttctttagacattaaaagcttctaacatgatatggaatccaagattccgatatcatgttagaagcttttttgttgtggtgattatattgataatggcatgaatgaacgcatgctgtcttagcttcaggaatcatataagatattaaatttcagttctttgaatgttttttaatttcttactaatatcatccagttcattcttcgcctttttaacccaatccccttgagctacattatcaaattcacctttattttttttgaaatgactacctatatttcacagctcactttagatatcgaacttgtttcttcagagttacttgttatattaccaggatttatttgatattccgtttgactcatgattcattaccctcacttggagtaaattgtaccgaatctgtaaaaaagatattttcttctttattttcgacaaaggtaaattcaagacttctagaacctacggatgaaccttttaaatctccatcacctttcaataatagtttcggagctttgttggttggaatattatatctttttcgaagttgcttcacattgtagtcattgttactcaattgatattctgctgaataactaggtacatttggattatatgcaatgtcaccatctttataatcattaatatctttaaagtcaccgtattgtacaaaaaacttaaagtcttcaatttcttttcttaatttatcatcagctatcggtttggttggaatgattctattatgttccattttcactggatattttgtatctttattatgtgaataccctttactatcctcggttatttctctaacaacaaaattacctttcgttgttctagtattacgatttatataaagcaccattcctctagattccatattgctattatttgtctcaataatcattttagagtgaattatccaagtgcctttatctcctttttcaaactcttcgtcacgaaatccttctttatcataaaagtcttcaagatttttggttggatacaagctcaacgttttgttgaagttttctttaatttgtttatctttactactttcttcttttttcattccgcaagcgctaataaaaacagatagtatcatcaagcatagacacaattttaacctttttgaatgaatcatcatttctccaccttatatttttaatactgattcaacctttaatttatacaactaaagcgaaaaattattttgaacactttatggaattttcatttcaaacttctattaaccctattcagtaggtttgaaattaatactatcagaaaaatacacattttcttctttatttcttataaagttaaattctagttctttagaacctacggatgagccttttaatcgccatcaccttcatacagtttgaagtcatatttaccaattgtaaatgacgactagatgatatatagttcaagaaacatcaaaattcgttaaaacataatcaaattttattatgttcaaaactttattttccaaaaaataaaaaagaagttaaacaaagattggttgcttaacttccattattgaattcattagtccgatttgacatagatcccgaaaaataatggctaatagccacttatagtcgaaattacgaactatataattcatttattattaaatggattatatacttgttgtgtttcttaatacctttttatactttaatatcttgaattttttctaaatcattactaatatcttttaattcgtctgtggcatttttcacccaagccccttgtgccgcatttttaaaatcatcttcaaattttttgaaatgacttaccatttggtcaagtaatattttctcatcacttttcagcttattttgatgatcatgatgcatacgaacatgttcaggcgcaataacctcactaatctgttctttttccttcatttgttccaatactgctaaatctggtaaaccactaaaatcaagtcccacgcttattcatctccttcaattctgtcagattgttttagatattctcttcttaaatcatctttataatcttctaatttcatttcgtgatgtcggatacgttgattcgtttctctatcgaaagattctataatacgtgtcatcctgatcatagcgtcttcactataattcattttatgtttgagatataagaaatgatcatacatttgttcacatttcctacgtgtttgatgtcttaattcatcaagttgattgaatgcatcattcaattgctttctttcttcatcataggcattttcaagttcattaatatttttatacgtagtaaacattacatcatcccatcaatctggctcgctaacatttggtcattagaaacaattgcttcgatactctgtttaatttttgcgatatagccattacaatttttataaacatcatttaatttctttatcttatcatcaatttttcttttaggatctgtttcaagtttactttcatacgcgccaccttttcttaattcatctataacctctgcagaggtcaatttttcaccaatttcatttccaactttttgcgcttttttccagttgtctccaaatttatgcgccatcacatgatacattttttcaaatgttggctttcttcattcactaattgatttaatccttcggcaatggttagtgctgttaaagcttctaataattgttgttgggaggaagagaggggtccacctgttatttgaatccaattcgctcttaacgtctctactttatgtaatctatgcctcgtttgtttacgaacggattttaatgctttattattttcgtcttggtagcctttaactttgtttaattcagctaagattatagcctgtgttctgctcattaaaataccactcattgcatggccttctccatttttaagtactattttttctccagcagtttcatataaatgattgcggacacctgcatctaattcgtcttcatcagacacaaatcttacaatgtgaccatcgtacttttcaatcaattttttaagttcttcttgatcggcataaaggccgctcacatctttgatcgctaatggagctggattatacacaacgatatgtttaatatcattactcatacctaaaatcatcgcatctctaccgcccagcgaatgtccggtaataatatcaatatcatagtcttttttgatatttttgataaagtcttgggtatttttataatgtggatctttatctgtgacggaatgaaggccaatattgacatcggccccaatatcctttagcgtttcactcgcatctatatatccttgataagaaggaacaccaaatgtttgttttaatattgcgtctttgtgtacattagtacctgtcatacctaaagtaactttgccagtgtctttatttaaaaaggcgcttgtagtcgtacctgttttggggtccgtataacttttaagatatgaaagatttttagggaatttatttttttcttgtaactttttaatttgtttatcaattttattttgttttaaaccactgttatttgcgttttctatttcataacttatattagatactgtacttgtttcttcagagttaccttttatattgccagattttatttgatattccgtttgactcatgatttatcatcctcgctaggtgtaaattcgaccgaatctgaaaaatagatattctcttcttgattttctacaaacgtaaattctagatccttagatcctacggatgagccttttaaattgccggatcctttcaattttaattcgggcgcttgtttggttggaatatgatatcgttttcttaactgttgaacattatagtcatcattattcaattgatactttgcagaataacttggcacattaggattatatgaaatatcaccatttttataatctttaaaatctttaaaatttccatattgtacaaagaacttaaagttttcaatctctttttttaacttgtcatccggtataggctttgttggaataattcgattattttccatcttgacaggatatttttttctttactacgtgaatatcctttactatcttcagttatttcggtgacaataaaattacccttcgttgttctagtattgcgattgatatagagcaccattcctctcgattccatatttttcccttttggttcgataaccatttcagaataaataatccaagtccctttatctcttttatcaaattcttgatctcgaaaaccttccttatcgtaaaaatcatcgagattcttggttggatatacacttaatgttttgttgaaattttctttaatttgagcgtttcgaccatttgtttttgtcataatgacacaacctccaatcaatataatgagtaataccaaacatataccgagcgttaatttctttgaatgaatcatcatttctccaccttatatttttaatactgactccgtttttaatatttacacctattacgaaaaattgttttgaacaaatgaatttaattgtaattattttgtttttcaaatcttcttatcagaattataaaacaattaaatcaaaagataaagtttgtatgatttacaattaattcctggaattatctttattatcttttacctaattagagcattatgaaaatttaactccaaacttcaattaaccctattcagtaggtttgaaattaatactatccgtaaaataaacattttcttctttatttcttataaagttaaattcaagttctttagaacctacggatgagccttttaaatcgccatcacctttcaacaatagttctggtgcttgtttcgttggtatatcatatcttcttcttaattgtcggacattataatcatcattacttaattgatattttgccgaataacttggtacgtttggattgtatgaaatattcccatttttgtaatctttaaaatctttaaagttgccatattgtacaaaaaacttgaagttttcaatttctttttttaacttctcgtcttttataggttttgttgggataatttgattatgttccatcttgacagggtattttttatctttatcatggacgtatccctttttatctttagttatctcacctactataaaatatcctttcgttgttctagtgttacgattgatataaagtatcatctctctggattttaaggctccttcttttaattggatgttcattccagaattaataatccaagtccctttatctcttttatcaaattcttgatctcgaaagccttctttatcgtaaaaatcttcaagatttttagttggatacaagctcaacgttttgttgaaattttctttaatttgtttatcttctttcacgttacacgcgctaataaaaacagctaataatactaaatacagccaaatcctcaactttcttgagtgaatcatcatttcacatccccatttttatttttgatgcaaagttaagttcaaattccaatattaataatactagaggaaattttatgattaaattctcgtcgattttaattgttagttgtatttttcacatatcaacatcacaaattatttaaaaagcgcaaatatctttataatttttattggcctaaccaactaattaattaagataaattgcgcttatatttaaaataataacactgaaactcaatgtctttacttattaaaattgatgtttaaatacatctttactaacattcatttttcggtttacattaatttgttagatagcgatatatatcatctcttacagctttatcgagtgctaaatccatcgttactacgtttgaaccattcagcattttatcttgcttctctgaaccttctatatatccagcagttcctaaataataaaaatatataccatcatcatcttttttctgtacaaaaatatacattttaattccttttgctctatgggacaaaattttctgaacttcttttgtttttagcgttctattagatttagtaaaccattttaattcatcttgacttaaaaattcatcttcatattttgtgctatcacttatatcttcatgcttatcataagtgataaatattggcatttcttggcttcttatcatgtatcccatgattacagacgaaccatttttattccaattaaatattttgctaaaatcttctcttgaatatttattatataaaatcagtccatttttacctttttggtatttttcattgttatactttgataattcaataagatcttctaaaaatattttaaatgtttgattacttagagcattagtaaatgcatcgcttagtcttatcattctttcattacgttctataatgggacttccatagattttttcaattcctgcgttgtaaaatgagaaatctaaaattcttaatgaagtatctatatcattttctgttatatccttaacttcgttcagcattttattttttaattcatcatatgttaattcattttttaaaagttcttctaaaactaaactatcgattcttttcaatccaggtgctatttgccttgaaaagaaaaccagatttttagattcattttccgtcaataaagcatctatttttttataccttactaaaaactcgtaataattactaaatttagaaaatataacgcttggatctatagaatgttgttgtataaaatccattagtaacggcatgtgtcccaatctattttcaacttcttcataagcttttaatattaatttattttgattcaatgatactgcatccaatgaattgtaaatctgttttttagcaatttcttcaaaattaattgtagatactccattaatcgaatcgttattcgttaaaaacttcttataattatctttattttgcgattgatccccagaaagcgcaatcggaattaaataatttgtcttataattaccaataaaatcaattactgtaacatactctttgtttgaactttttcttaatcctctaccaagttgctgaatgaatataatactagactctgttggtctcaacattacaacttgattgacttctggaatatcaataccttcgttaaaaagatctacagttataatatagttaatcttaccttcttttaatttttctattacaatttggcgataattaacactatcatctcctgttaaagcaacacttttaatcccttttgaacttagtttatccgctaaatcataagcttcttttttgctacttacaaaaattaatccttgtaaaatttcacctgaatatccatagtaatctgttttttgaataatataattaactctttcatcggaagttaaatatctcaatttagttacatcatcttcttttataccttgatgtacataatcagtcacaccaaaataatgaaatggacataaaatatcactttctaatgcagcttgtaaccgtatttcatacgcaatattataatcaaatagttcaaatatacttaattcatctgatctttctggtgttgcagtcattccgagcataaacttaggtttgaagtaattaaatactcgttgataagtagatgcagcagaacgatgtgcttcatcaaaaacaatataatcaaattctttttcatcaaattgcttaaaattatcatctctagataatgtttgaatggtcgcaaataaatatttggcatcgacatctctatgttttcctgtcaacaatccaaaatcactatcattttttataggtaatacttttttaaattcttccttagctctatttaaaatcccctcattatggacaataaataaaaatttattagggtttacttctctaacatctaatgcacataaaatcgttttgcctgtaccagttgcagatattattaacgccttatctttggctttatcccttatagcttttaatgaccttaatgcttctgcttgcattaaattcggtacaatttccactgattttttcaccttatcagctatcagcatttgagtttgttcaacctccgctaatttttctaaggagcggtactcaaatgattctttatatgaattaatccattgctgagtcagtggggtactgttttgccataacaagtcaaattcattttttacactatcaaccaaatccccatttttcatagtagacagtaaaacattatgctcataattaacctttaacgcattagatgttaaattagagcttcctattaccatagaactataatccttatgttcaaaaatatatcctttggcatggaatccagcaatataggttaatcttacctctacattttttaatttaagtaattctccatacattttaggactattaaaccctaagtaattagatgttaatattttccctttaacacccttattgcttaaatctaatagttgagcctttaagctggctaaaccgctttctgttataaaagccacagaaaaatagaacgtttcacatttttgaagttcatctataattgttgaaagaactttttcatttttattatttactaaaagcttcggtgtataattacctttatgagaaatatctttgtctataaaccctttatgtaaagattgattgaaatcatttagtaatctactcatattatccctcagtcataattttattaacggctggtatatccgctggggcccaatttaatttatcaagttcgtttattgacaaccattcaatactcttatgttcagttagagttggtaactctttgtttaaagtacatttgtatgttgttaacctaacaattccaaaatcatattcatgttctgtagttataactttgtctccaacaattagatcacatttcatttcttctctaatttctctaatcaaagcgtctttttcagtttcattcttttcaatcttaccgccaggaaattcccacattaaaggtagactcatttcttcacttctctgtgcacaaagaattttgttatcagaaaaaataatagctcctactacattgattacttttttcataagactcacccttcaaattaaaatcatcttaattgttattctatcaaaaattacaaaactatatataaatcaatattaaaaattaatatttttcaatttcctgcatgatatttcactcttacatctactccatgcattttcatacacatctattatataatacttgtgaaaagtattgtcttggggctgtgtttttttacttttggggcgtatttctttataattcattacataaatgtaagggctttagttttcatgttttattaagtctaactgagattttgaaaggatgtttagcaacaatgaataaagaattatggatagaaagagctaatgatagtttagttaaacatttttatgagcagcaatctgacattgaacagcgagaaggttttgaaagtaaattaacgtttggtactgcgggtatacgcggaaaattcggtcttggtgaaggtcgacttaataagtttactattgaaaaattggcattaggtttagcgcgttatttaaatgcccaaacaaacaatcccacaatagtcattcattatgatattagacatctttcagctgaattcgcccaaattattgctaatgtattagcaaaccatcaaataacagtttatttacctgatacatataaaacgacaccggaattatcgttcgcggtgcgcaatcttaatactacttctggcattatgattacagcaagtcataatccgaaagactataacggcattaaagtatatggttctgatggcgcgcaactatcaacagatgcatcagaacttgtaagtcgctatattgaagacgttggcgatccattacagattgatataccaatttcaaaacaaaatacatcttatatcaagccatttccgaaatctgtaactgatgactatatgaaacacattcaaaatatgattggctatattcctaaatctgatttacaagttgtgttcactagtttgcatggtacaagtgttccgattgtacctaagttattaaaatctttgaatttcaatcaatttaatcttgtagaagcacaatgtaaacctgacccaaattttagttcagttcaaagtgctaatcctgaagaccatcgtgcttttgatcaagcagtcgagctagcgcataaaaatgatgctgatttattaatatgtactgatcctgatgcagatcgccttggaatcgctgtgcgtgatgtccatggtcaaattacatattttaatggtaaccaaattggcgcgctgttacttaattatcgtattcaacaaacgtctcaattacgtcatcgcttaatgattcaatccatcgtaagcagtgacttaacaaagtcattagcacgctataataatgttgaatacaaagaggtgctgacgggctttaaatttattgctcaggaaataagacaactggatgattatcaaaatatgattttcgcctttgaagagagttacggttttctatcagatccttttgtacgtgataaagatgccgtacaaattgtgccactcattataaaatacgcttctgagttaaaattatatggcaaaacattgaaagatgaattagaacagatttatcaaactgttggtagacatgaggatacattattctcgcatacgctagaaggattagaagggaaaaagaaaattaatgcaataatgaccaaattccgttcaaatccaccgcaagagattcaaggactgaaagtgaaagcaattgaagattatttaactagcgaggtttatcagttggataaagatacaacgtcacagattaattctcctaaatcaaatgttattcgcgtcttatttgacgaaggatttatcgctttacgtccttctggtactgaacctaaaattaaattatatgtgtcgttaaaatgtccgaattttgatgatgtagctcaaaaaattaatgcgatgatttttagctaattaaaaattttatacatcgaaatattacatttcattttatacttatcagcccttttgaaactagaatccttatgttttcgcgttttgaaggggctaatttgtaataatttttcaaaagtatattagaaaattaattttcatgtatttttcatattaagcggtaataatataataattaataccgcgacctatttaattgttttcgcgatgaaaaaggtttagaattacaaaaataactattttaaatttagttacaaatatattttagaaaggatgtgaaataatgaaaggctctaaacaaatacttttgattatgggcattatatctcttattgttttatttatttttacattattcatcatggcgcaatatgcaaaacattatgaacaaaaatccgacagttccaacgcacatactttaaattcatcatcagccataattgagcaacatactatgtcgaatatagcgtctctagatttatacgctcctgttcgtaacattacttctagtcgtgatattcatcccatttatttcatgacaaaagattaaaacttcctttttcataaccccattcaactaataaattaaaaaatgataaaaacgtactgttttttagaaacatacatatataagaaacgcatccattactaaaagacagtacattatattctatcgggaaggtgcaacaatgaccgtcaacatcgtatttagtatcgtattctgcataagtatggttatattaggcatttatgtcgcaataactaaagatttcacactaatttcttatataaatcaaacgaccattgcagataaacacaagaaccaaattgcatatatatttgcgttatgtatcagtttgagtgcagtatttttaatgtctgcaattctatgcttcgaatatgattttattgcattgtcattcttatttttaacgatagcattattacttatcgcattattctacgtttgcttttataaaattacaaaatatccataaatatttgcgatagtgtgttggttagatttaatggtgcgctgtcagtaagcaattgtttgcgaaaaaaatacaaccttgtacgaatacaaagttgcattaatatagaaaaatttatgctttttaatgttataaacctaattctttaataaatcgtgttaattcttctcgcatactgtcatctttcaatgcatattctatggtagttttaacgaagcctaatttttctccaacgtcataacgttcgccttcgaagtcatatgcatacacttggttatcattattcatacgctcaatcgcatctgttaactgaatttcgttacctgcgccttctttttgcgtttttaaataatcgaaaatttcaggcgttaatacatatcgccccataatagctaggtttgatggtgccgtaccttgtgctggcttttcaacaaactttttcacttcatactgacgtccatttttagttaatggatcaataattccataacgatgagtatctgcttccggaacttcttggacacctataactgagtgccccgtttcttcataaacgtcaatcaactgtttcactgctggcacttcagattcaacaatatcgtcacctaataataccgcaaatggttcattgccgataaattgacgcgcagaactaatcgcatgccctaaacctttttgttctttctgccttacataaaaaatattcgcaagttccgttgaatactgaactttttctagtaactcagatttacctttttcttttaaaaccatttctaattctttttgactatcaaaatgatcttcaatcgcgcgtttgtggcgacctgtcactataataatatcttcaattccagctcttgcagcttcttcaacgatatattgtattgtgggtttatctaagataggaagcatttcctttggcatcgctttagttgctggtaaaaatctagtccctaaaccagcagcgggaatgattgccttttttatttttttcaaagttaatgtgctccttttcctaagtattaaatctatgtatcaacgtcattttaacactaattagaacgccttcatagtgtcattgagtatgtaattatttcttgggaaatttgatttaattttaaaaaacaggcttacttcatataatttatgaaataaacctgtcaattttagattgattatgctttgtgattctttttatttctgcgtaataacgctaaacctagaatgctgaataatccgccgaacaacatacctttgtttgttgattcttctccacctgtttcaggtagttcagatttcttagattgtttttgtttagttggtgccactggtttaaccttttcattgatttcaataacaggtgttactaccttaccttgttccactggtttagaaggctttttaggttcttctttggcaggtggtactggtttaccaggttcagctggtacctctggcgttggcggtgttggtgtttccggctcactcggtacttctggtgtcggtggcgttggtgtttctggctcactcggtacttccggtgtcggtggcgttggtgtttccggctcacttggtacttccggcgtcggtggcgttggtgtttccggctcacttggtacttccggcgtcggtggcgttggttcgcctggctcactcggtacttctggtgtcggcggcgttgtatcttcttcaatcgtttgttgaccttcattttgaccgcttacttttggaagtgtatcttcttcaaaatcaacactgttgtgtccaccgaattgataattaggtttatctttatttgtatcttcttcaataatttcattatgcttattgaatccatgaatttgtggcacactgtcgaagtcgatatcaatgatgttaccaccttgttcatacttaggtttgtctttctctgtatcttcttcgaatgactggttaccattattttgaccttggatttgaggtacactgtcgaaatcgatatctacgatattaccaccttgttcatatttcggtttgtcttcttctgtgtcttcctcgaatgactggttaccgctattttggccaccttcataacctaattcactcttaatatcaacgtggctattttcttcgatttcttcaatcacgccataattaccgtgaccattttcagttcctaaaccagaatgagaaatatgatgattgttttcagtgatttcctcgattggtccttgtgcttgaccatgttcttcaggtagttcatctactagttcaatcagattactttcagttgtatattctttcgtatcttcaactgttgtatggtcgctcactgcgccagttacaataccttttgtagactcttcgtcaaattcaactaagttagactcagttgttacttggccaccacctgggtttgtatcctcttcatattcaacaacatcagcatgatgttttgaattttcatgtgtagattcttcaaaatccacatgaatagaatcttcttcagtttcaatggtaccttctacatgaccttctgaaccttcaacagctgtatgatattcaaaatcaattggcttagaatcgttactttcttcgattgtaccattcaattcatgcttctccactggaggctcagatttaatgtctaactcaattggttcactcttatcaatgataggatcatttggtttatctttaccatcgccttgagcgctattagagtaaaatgcaacgccattgttccaagttaattgaactgggtaataatagttaggatagtatgggtaatttttatgatatcctgaaagatgtgttcggaaatttaaatctttagcattttgatcatattcaccttcatatttaattacatagtcttttgaattatctaaatcactaaagtccaaagaataaccgccatctcctgtgtaacttaagtttactttgttagtcacatcttcaaatttattggcatcatcaagctttgcataaacactttcagctaattcatctgaaccaatgtgtttatatattttaactgttggtttattagcattttgtttatatccagatgttacttgaccagttactgtgacagaagttaacgactgattgttaggcttcacgtacgcaaaatggctaaatttcccaccttctttattcaaagtatcaattcggccattaacagtaacacccattctatctttaacaccgtctaagtattttatgtcaaattgtttagatatcttcttctctcctaaggtcacttcaatattttggttacctctttttgtcactgttgttgggtcgataaataggtttaaatctaactcagcttttaaatcttttttaccttgtacatattctttaaatgtatacctaattttcctttcttcattcacttcacctactgccataacttgcccatctgtactttttatttctggaactttacgcagtgttgaaataccatgcgtttctacattattacttaatgtgaaatcaaagtagtcccccggttttacatcttcaccgaatttccatttatattttaaagttactctttctgcattatgaggattaacaacgtttgtctctttattgttatgccctacgatttcactaccttcttctactgtaactttacttgttacatctgtacctgtcgccttaacttctttctccactacttctttctctgccacttctgcaacgtcagctgatcttttcattcttggtttaatttctgagacgttacttggttgagttgtgtcaacttgagttcccgcagtttccttttcaacaactttttccgatggtaaatcttcttgtggtttcatttcggtttctacttttggtgcttgcacagttattggtgcttcttctgttgttacttgtgttgattgtgatggttgctcagttgatgtcgcgctgtatgattgtgtttcatctattgtattaacgttatttgtagttgtttgtgtttcgcttgctttactttcagtagctgaactcccactttcctctactgtagtattgttttgttccgatgctgcagcttctttttcttgtcccattccaacaacgatcattgttcctaagaatactgaggccgctcccaatttgtgttttcttatgccgtatctaagattgcttttcactataatattctcccttaaatgtaaaattcatttattttgtaaactcaataaatgcaattctatattgttcggtttttaaaagcaatgaaaaaaagcgagttaataaaaagttaagattgttgttaactttatgtataatggttttttattatttggaactcacatatatattgcatacaaatctcttgaacaccttgatataactggattgtattttttatacttactttttaaattaaattcaaattcatctaatttaaaacaatatactaaagcatacataataatcgcctgtacaatgcatcattaacaagtcactgaaacgcctttcattgtattaataacgtcactataatttttatatcgttcggtttttgtttgattttaatgattatttatacagaaacagccgtatttcaagacgacattttaaatttaactaaatttgcatctagttaataattgcatttatcaaatttgtcttattgatccaatctaatttttacttacaaactagttttaaattctaactttatctctcagttcgttatcaatcatcagacataaacaaatgaagcaatcagaaaacattctaattttctattagaaatttgatttaatctaaaaaaacaggcttacttcatataatttatgaaataaacctgtcaattttagattgattatgctttgttattctttttatttctacgtaataacgttaaacctagaatgctgaataatccgccgaacaacatacctttgtttgttgattcttctccacctgtttcaggtagttcagatttcttagattgtttttgtttagttggtaccactgctttaaccttttcattgatttcaataacaggtgttactactttgccttgttccactggtttagaaggctttttaggttcttcttttgcgggtggcactggtttaccaggttcagctggtacctctggcgttggcggtgttggtgtttccggctcgcttggcacttctggtgtcggtggtgttggcgtttccggctcactcggtacttctggtgtcggtggtgttggtgtttccggctcgcttggtacttctggtgtcggtggtgttggcggcgttgtatcttcttcaatcgtttgttgaccttcgttttgaccgcttacttttggaagtgtatcttctacaaagtcaatgccattgtgtccgccaaattgataacttggtttatctttatttgtatcttcttcaataatttcagtgtgcttattgaatccgtgtatatgtggcacactgtcgaagtcgatatcaataatgttaccgccatgttcatacttaggtttgtctttttctgtatcttcttcaaatgattgattgccaatattttgaccttgaatttgaggtacgctatcgaagtcgatatctacgatattgccaccttgttcatatttaggcttgtctttttctgtatcttcctcgaatgactgatcacctttattttgaccttgaatttgaggtacactatcgaaatcgatatctacgatattgccaccttgttcatatttaggcttatcttcttctgtgtcttcttcaaatgattgattgccaatattttggccaccttcgtaacctaattcactcttaatatcaacatgactattttcttcgatttcttcaatcacgccatagttaccgtgaccattttcagtacctaatccagaatgagaaatatgatgattgttttcagtgatttcctcgattggtccttgtgcttgaccatgttcttcaggtagttcatctactagttcaatcagattactttcagttgtatattctttcgtatcttcaactgttgtatgatcgctcactgcgccagttacaataccttttgtagactcttcgtcaaattcaactaagttagactcagtagtaacctgtccaccacctgggtttgtatcttcttcatattcaacaacattagcatgatgttttgaattttcatgtgtcgattcttcaaagtcaattggatttgattcctcagaggactcagtgtatcctccaacgtgacccgcttcgctatccacagcagtatggtaatcgatatcaatagctgatgaatccgtttcttctattgtttcaatgtatccatcaacataaccaccttcaccatctatagctgtgtggtaatcaatgtcaagcggtgtattgtcttgattttcttctgtttcaataatttgcttggcatcgtactgcccgctcatagttccttttgcagtatcttctttatattcaaaatcattattttgaataatttgtccatttttaccattgccatcagctttattgctatataaaactaaaccattatcccaagttaaacgatatcccccataaacatagtaagatttatatgctcgttctggatacccatataattcagttctaaaattaacctgatctgacccttgcaaatattcacctgtataatgaatgacatacgttttatccaacttatctaaattcaatgagtaactaccattgtcttgcacactcaattttccattcatttcatttgttacatctttgaatttgttagtatctgatgtatttgcataaacactttgtggcaattcatcttttttccctagatattcatatactttaacagtaggttgtccaccagctaaattactaccttcagtcaacgtccctgttactgatacagtgtttgactggtttccattcattggcttaatataagctatatgtgtaaatttattagattctttattaaatgtttcaattgatccatttacatttgtataactattgctaacacctggattataaacaactggtattgttttttctgtttcttcaccatttaatttagaagtaatcttttgttctccattgctttgtacagttttagggtcaataaataagttgatttctaaattagctgttacctctaccttgtgttcaatttcgttagtaaatgtatatcttatgttaccattccctaaaatctcacctgtagccattacaactgagccatttttaatctctggtacctttctagctgttgaaaccccataagtatttacattatttgataatgtaaaatcaaaataatctcctctttttaatccatctgcgaatttcaatttgtatttcaatacgacacgttgaccagcatgtggctctactttatttccttgaggtgcctcaatcgaaccactttctactgtaactttacttgtcacatctgtacctttgacttctgaaacgcccataccttccttagcttccactacatctgctgatcttgtcacacgtggtttactttctgatactgttcttggctgtgccacttcaacttgtgtttctgccacttgattttgtgtagcctttttaggtattaaatctacttgtctttgatctccgctattgtcttgagattgtgtcgtttccttaacttgaggtttcgcttcttccttaactacctcttctttaactttttctacatttgctggttgtgcagtttgtggtgcttgtactgcttttggtgcttcttcagttgttacttgtgttgcgtttgacggttgttctgttactgttgcgttatatgattgagtttcttctatatgattaacgttagttgtagttgtttgtgtttcgcttactttattatcagtagttgaattcccattttcttctactgtagttgtcttttgttctgatgctgcagcttctttgtcttgtcccatcccaacaacgatcattgttcctaagaatactgatgctgctcccaatttatgttttctaatgccgtacctaagattgtttttcactataatatctccctttaaatgcaaaattcattaatttttttaaacttaataaatgcaagtctatattgttcggtttttaaaagcaatacaaaaaagcgagttaatgaaaagttaagattgtcattaattttatgttaattgataattttattatttgaaatatacctataaattgtattcaagtcgtcagaaacccttgtcacacaaggcttgtattttttatacttattttttaaattaaattcatcattatctaatttaaaacaatatacttaacgtttcataattatcgcctgtacaatacgcacaaaaacatgtcttgaaacgcctttcattacactaaaatgcccaatataatttttatatcgttcggattctgagtgtttcagacgattttctgcataaaaataaacgtgtttcaaggcaatatattgtaattacctaaaaacacgtttacttaatatttagttaaacaaataagctgatgaataaaatgaaaatgatacccgaaacggaaataatcgtttctaataatgaccatgttaagaatgtttcttttacagttaaaccaaaatattctttaaacatccaaaatcctgcgtcatttacatgagacaaaatcacactacctgcacctatcgcaagtacaactaatgcaacatttacatctgatgattgtaataatggtaagacaatacctgtagttgaaatcgcagctactgtagccgaacctaatgcgatacgtagcacagctgcaacaatccacgctagcaaaatcggcgacatctctgtaccttcaaacattttagcaattgtatttccaacaccaccgtcaattaatacttgtttaaatgtaccgccaccgccaatgattaataacatcataccaattggataaatcgcgttcgtcactgattccataatatgattcatcttacgttttctcattaatcccatcgtaacgattgcaaataatactgctattagcatggctgtccctgctgttcctatcatataaatgatagattcaaatagatttgtaggtttgtcgtgcccagttacaagttgcgttatcgtagacactaacattaatataactggtaatgttgctgttaataaactcataccaaatcctggcatctcttgatccgtaaattctttttgtgcacctaacgctgaaatatcgccttctcgtgtatacgcagacggaatcattttttgtgcaattttgttaaatataggtcctgcaatgagtgtaactggaatggcaatgatcataccgtatagtaatacatctccaacatttgcctttaattcttttgcgatgactaccggtcctggatgtggtggtaaaaagccatgtgtcactgataaagctgttaccataggtagtcctagttttaacactgaaacatttgcgcgttttgctactgtaaatactaatggaatcagtaagactaaacctacttcaaagaacaatgcaatcccgacgataaatgctgcaacaagcattgcccattgtacatgtttttgaccaaatttttgattcaacgtgtctgcaattcgagttgcaccaccaccatcagcaagtaatttcccaagtatggcacctaaaccgaatatcagtgcaatgtggccgagcgtactgcccatccctttctcaatcgtctccataattttagtcaatggtatacctagcattaacgctgtaatcatcgatgtgataattaatgaaataaatgtatttaatttaaacccaataattaatactaataaaataacgatacctaaaacaacactgattaacggccatatttcgttaaacatgacattcccctctttctcttttcaatagaatgtaacaccgtcgtcgcgcacatattcgacataatatatagtagtcatggcacaacaactttatctaagatgcttgagtgacgtatttattgtgttttattttcagccatatgttggcgttgaaaatctgcaatttgttcataattctctgttaaagaacgacttaaattgataaaaatggatacgagctcttgataaacagcgacattttctttaatcggcgtatgattgtttgtggcaccgaccatcgatgaaatgattgaaaaatcttcaatgtcatctacagctttaagtccgagtacgcaggcacctaagcatgaactttcataactttcaggaaccactaactctgtgtcaaatatatctgacatcatttgacgccatacttcacttttcgcaaaaccacctgttgcttttatcatcttaggtgtttcattcattacttcaataagcgcaagatagacggtatacaaattgtaaagaacaccttctaatgcagcgcgaatcatatgttcttttttatgagataaagttaaaccgaagaatgaacctcttgcatttgcgttccaaagcggtgcacgttctcctgctaaatatggatgaaatatcaaaccatctgcacctggttttacacgctttgcaatttgagttaaaacatcataaggatcaacaccgagacgtttcgcagtttcgacttcgcttgctaacaactcatcgcgcaaccatctcaatacgacaccgccattatttacagggcctccaatgacgtagtggtcctctgttaagacataacaaaatattctacctttataatcagtacgtggtttatctatcacagtacgaatcgccccagatgtaccgattgtgacagcaacttctcctttaccaacactattgacacccaaattagaaaggaccccatcactcgcaccaataacaaacggtgtatcttcattaagccccattaatgttgcataacgttctttcatgcctttcatcacatacgttgttggcactaattccggcaacatttcctcggaaataccaagcaattctaatgccccaacatcccaatctaatgtttctaaattaaacatccctgttgcggaagccattgaataatcaatgatatatctatcaaacaaatgatagaaaatgtatgttttaatatctgcaaacttagcagtacgttgaaatacatcttgccattcatgtttcatccaaaaaatcttcgctaatggcgacataggatgaataggcgtacctgttcgctgataaatcgcattgccatcatgcacttcatttattactgttgcatattttgcagcgcggttatctgcccaagtaatattatttgttaatctttgatgttgctgatccatcgcaatcaagctatgcatttgcgcactaaatgacacaaatttaatattatcttgattaactttcgattccctcattatgtatttaattgtcattaataccgcatcaaataattcatctgggttttcttctgagacatcaacgtttggtgtgtgtaaatcatagccgatttgatgtttcatgatgaaagttccattttcatcatataagactgacttggtactcgtcgttccaatgtcgacaccaatcatatatttcatgacaaatccttctttcattttaattcaaccaaaatccttcaatatctttaccaacatcgtcgaaatttaaatgaaacgcttctttcaaaatttgactgtcgtattgttccactgcatcaataaacacttgatgattatgatgtatgcgttcaaaatcttgcgggttttgttgcatacgttgtcgcatggatgttaaaacgagtgccatcattactggttttaaatgactccaaaatgagtttaaatattgatgattagatgctttgattaatgtttcatgaaattcaaagtcatgcttcgtaaatgattctgcatcctcaaattttactgccactttcatcatttcaagttgtttcttcatttcttttacgataggtagtcgctcttgatttttaactcttgaaaatgcaaaagactctagcatcagtcgcaaatcgtacatttctttcttttcttgttccccaaacagcaacacatgtgcacccattctttctaattggatgagttgattttgttgcaataatttaaatgcatctcgaattggcgaacgactcacattaaattgctttgccatttgattttctgtgagtaacgtaccttcagctatgtgaccattcacaatgcctaagcgtaattctgctgcgattccttctccagttgtcataccttccaaccatttttctggatatccatacattatcaaagtcactccttcattacacgacatacttgtatacaagtatgttaatatagttctcaagtgtttgcaagcgctttctttatgtgcactaaaatagtgaccaccccttttcgatgtaaatctaaagggaatggtcactatcacacgaatgatttaattgttatttttagtgcggggtacttctagttgttctgtactcatatgcgctttaggtacttcaatgcaataatgcgtttcatgacagttcggacattcaaatcgacgtgttgtcgctgtatgtttcgctttgataactgcccacaaagatggtgagaatatatgctggcagttaggacataaataggcaaccttttgttggtaataaaaagtaacaccaatgccatacccaatcataaatggtaaagcaattaagaacggccatttgtttttcatcaagattgaactcataatgctagaatattgaattattcctataataccagcactaatccaaatgttacgacgaatacttttcatttcagctgatttactcatgacatgctctatgtcttttaagtgtgtgattggagacgtcgacgcttcatttacgtaatattgaacatttttaattttgtttaataccgcttgttgctgtttgacttgttggttaatttcttgttgtttcatagttagtaaagtattgagtgtcttcaaagtaccttcaccttttagcaacatatctatatcgcttaacgcacaacctaaatctttaagcaataagattaactctaatgtttgtcgctgttgttctgtatacacacgacgctttccttctgtaaatccttgtggtttcaaaatacctttgcgatcataatattgaatcgttcgtgttgtcacattgcataattttgcgagttctccagtcgaatagttagacatagattccacctcctataattaccaaagttgatgacccgacgtcacgagcaagtacaatttccacattttaaagaaatttattatacttggcgtcttatttttatgatttcgtaccatgttgatttacaaaaccactcaaattaagcaacactcctagtaaacgtctactcagttatttcagaatgaatttgttgtaatttattttcaacttcagtaatctctgtcgcacattctttcaataaatctcgatacttttccgtctctgccttgtttttataacgtattttatgttctaaacttgcccacatatccatacctattgttctaatttgaatttcaacaggcaatacctcaacgcgttctgctaaaaagactggaatggatacaacgatatgtaaactgcggtaaccattttctttagggtgctgaatataatctttacgttttatcaattgtacgtcttcttgtttaagcaacatctcttcaatcaaataaatatcatctaagtaattacatactacgcgaattccggcaatatccagtatgtgttctttggcagtttctgcgctaatctgtaatcctttacgattaagcttttctattaaactacgcatttctttcacacgtcgctccatatgatgtataggattgtgtttataaatgtgattgaaattgtcatctaaaatactcagttttgtgcttatttcctttagtgctgatgaataaatatgatctaactctacgaaacctaataacgtatcaaatgcttcatcaccattttcaaatttacttaaactatttttaaaatcatgtcgcaaatcctctaaatatagtgatggttttcgatctacatacatttttatacttacctccgatatataatcatctttattgtacctaacattttattaagataatactaatacactatcgaactttgggctgatactgaaacagcacaaagaaactcaaacaattcgaattatgtatcaaaaccttcaattataggaagtaattttaaaatgatttaacgcaaaaaaacacctgttaccgttatataggtacaagtgcttaattgatagagatgttatacgtctttaaatgattccacaacttttggatgcggaccatccataagcggttctctttgtcgaatgccaccactttggttgccaattgattcgctatcaaagtacgatttatcttgatttgattgttcttgaatatgttcttcattatcagttgttgcatattcactatccacctctggtttttccattgttgctgtatggaattgtacgaagttctcttcttctaatgctttgatttcttctttcgataacgctcgataccaatctttcgcttttttcgccgcaataggaacaacatctttttcaagatatccttcttttaacattgcattcgcaatttctatcgctttttgccgtttaattacttcaaattctttccatttttcggggtaacctttcattgtaaagggcatttccttaacctccaatatgttataattcatgttatataccaccataattataaaatgaaacatattaaacacaattttttagactcccgtcataataacttcagacaaacgttagtctgacctgataaatattttattttaaacgttcttgtctctctcacgaaaaccattgtgttgaatattcatcattgctgattgaatataattatactgtggtaaatctggtaatatctttatttctaattctgtatttaattctaaatgcttagcgatgttttcaaatgttgctaaatactcgcccattaattgttcatttattgtaagtctatcttcattagccatggctctatttaacataaaactaatttcttctaatgcgaataagctaggataataattttgaatcaatgtcttatcactaaataattcaccattagctgcattataaacttgcgtcatgttatttaatttcacagataggttcatagctgtgtttttttgatatacatcatctttatattggttttcagaaaataaataatggaagagcgttgcttctttacgaaaaacttcagccattacataaggaagcaatgcggatgcggtacgttgcccaaggacaaataaacctatgattgcaatcacaatccccattgcaacgtcaataactcttggaaacgcaatgttaattgttaagttctgtgatgctaatccgttcattaaaataacttggattgtaataaaaactactgcaattgtataatttgctcccaccaacgcttcagtaaataatgctgcaatgcccattaaaattactgcaacaggtgttggtattgaaaacaacaatataactgaaagtactagcacacctaaaatggtgcctaatccacgtgccatacctctctcaattgcatgtatagttgatgttcctaataatactgtatgtgcggataaaggtatccagtatgctttttcaaaatcgaacattaacgcgataaatatcgctatcatcataatcgctgcatacctcaatgtatttctaaacacgattgaatctaatgttaaattttgataaatacgcttactatataaaggttttcgcatgtctgcttcatacgcaatacgcgcttcatttgcatgcaccatttcgtcaattttcaagatatggttgaataaattttgaaattcttctgatactgtcacttcttttcgccaatatcttacattttcatcactattatctagttgtgcaatgatatgatccatcatttcaattaactcatctggcaatggtctaatttgtttagcgttcaactctaacagttcagaataaatcccttgggcagatgtgtgtaataataataatttttggaaacgtctacttaatttatcgttacttgaagtagaagtgatgagtagtttatccgacgctttaaaactatccaccgctgtttttgctacttgtgaaaatgcagatttatcattgtaagcatgcaataacttagatatgagtttaaaatcgttttgaatggcttgttcttcagctttgtttttagacaataagattgtgatgagtaccatcatagtggcaagtacaccacctactaaaatcgcaaagcctctatataatgcttcttcaggtgctataggtaagttaatgggtaaactgaatgtcacaatgaagaatgtcgatgacggtccagcaattttcaaggcggtaaatatataaaatggtataaccgtaacaattaataatgtcattccaaaaacgagcggcgttgtggctgttagcgtaccaagtatcatgcatattgcaaacgctaaattacaaattattacagttcgcagcttagatcgcgacggacctttaaaaacgtagatatgtgctagagttccggttgcaactaataatccaaattggaaattaccacattagtaaccgatgattgcaggaataatcattaacagtccttgtcttatccctttataaaagtctaagttaagtcgattaatttttataagtgatgtcaaaaagatgtcatttcgacttctcccttcctcgtcaaaatatttccataatcattttattagcatagttaatttgagtatgttgctataaattttatttgtgcaacatatgtcattataacaccttatgctcaattatctaaatttaaaaacttttaaagtccaattaaatttattttataatgttatttaacatcggtgaacctattggtcgcccaactttgagcgagttaaaatttatttgtgacatgttgagattattttagtgaattatacatttagggttagaaatacattcacatagacttagtgtctatttacttcatattattcctaaggttcaagatccaaacgatagtgaatttaagaaagtttataaaacatatttgcctcataagcttgaatagttcctatattcgttatttaaaatgacattcgatgtcagttcatttcttaaaatatcgaaagatgattacgtataatatatatagtgacgtatttacaaataatggcagtaagcagtacaaaatgattacacaaaaatttccttctactcgataaattaagaagtataaaataattaaaaaaatacttataattagacctataagaggcaaacttctaatatatttctctaagttttccttcatatgtataacctcctaaaatttatatgtacttttacaagcgttacctgactaatgttttaaaactttatttcttctacatatattattttaataacttcccgttcatcttaaaccatatctgttttaaaatttttcaatttcgacgtaaaaaaagcaataagccccaactatgtgaaagcttattgcatgtttaaattatttttctattgctttatcatcactaacaattaaaggttgatctggtttcacatagaaccacataatcacagcgattactgctggaacgattaacaattggaatgtcattgtccaacctaaatgttctacgaatagacctgctaatagcggactgattaatgcacctatattaccccataagttcatccaccctgatactgtaccagagaagttacgtcctaagtcagttgctgcagcccaactcatacccatttaaataccgataccaccaagacctagtgataaccagaaaatacttacatataaatttcctgtacgtacagcaaagataattgaaactgcaaatacaataaatcctgcgattgcaatgacacctctagctacgaattttgaacgacctaatcctaatacacggtcagaaattgcacctgctgataagattaagaagaacattaataaccaaggtaatgaactaatgctcatttctttaaagttaacgtggaatacttctgttaaatacgtcggtaaccaaattaagaataatgtaatgataaattgtacaacaaagtattgaattgcaattgcatagaagctaaaacgtttaaagaaatcattccatggtggtgatgacttttcagtagctacgatatcacgattttccataatgaaacgtttctccgcttcattaaccattctatgttgctcaggtaagtctttggcaataatcgcccataatacagccattaaaatccctactgcaccaaaaatataaaatactgcttgccagttaaatgcattaacaatagcaattgtaactattggtgctaataccggtccgaaatatgatcctgctaataatgcacttgatgctctacctttttcatttttagagaaccaaaatgaattaaacacagcattagaagggtacattggcgcctcacccacgccaaataagaatctcactaaataaattaaaccgtggttcttaatcatacccgttaagattgtaaatgcactccaccaaactaatgcaattgtaatcatcttacgtggaccgaatttttcagccaacatccccgatggtacttgcattaatgcataacctagagagaagaatgatgccaataaaccaaattgtggttttgtcatccctaaatcatccatcatttgcttagcgatatatgaaatgtttgctctatccatatacgcaataaccccaataaagaagaacgcaagcgcgaacatccaccttacgttagttcgtttttccttcataactattcctacttccctaattaattttttaaaacttaccctgaaacgttaaaattttcggacatctggcatgtccacccctactttgtcacaaaattgtaccaaagttattttttataatattatcagacatggaaagcgtttacaatagaatctataaaaattttattaaattccgcttaacttttgctattaaaacgatataaaggaacttttagttacatagtagcctatcatttgttaattaaaaatactgcaatcctagtgttttaaaacgtatattgcaggctttcttacatgtttgacattcattttaaattgcataaaactacattgctcattcattgtgcagcgcctgttatttagatgatcatttgttgacttttcgtacttatagcaagcaattttttgatttattgcttataatacattttaagacaaatgcttgtttcaacatcgcatacgacatcattcattattcatttgaatttatccagtttctatttgtctgcaattgctgaaaattaaaggagcttatttttaataatggaacaaattatcactgaatttattagtcgttttgggtatgcagccatttttatattaattttattagaaaatgttttacctatcgtaccatcggaaattattctgacatttgctggtcttatgtctgttaaatcacacttatcaattttaaccttatttattattgcaaccatcgcatcgtttatagggctgttaattttatattatatctgtcgtttgatttcagaagaacgtctatatcgttttattgatcgacacggtaagtggattaaattgaaaagtaaggatttaaagcgagcaaatgattggtttaaaaagtatggcgtatgggctgtatttatctgtcgtttcatacctgtattacgtgtattgattaccattccagccggtgtaaaccgcatgaatgttgtgacatttaccgttatttcattaataggtacaacaatttggaatttcggtttaattttactaggacgcacgttgagcgatagctttggtatgttgatgactggtcttcatacatattcacgtattatgtatgttgtcatcattatcgcagtcatttactttgctatacgttacattggcaaacgtaagagagtaaaataatattgttgttagcataaaggcatgaattttaaatttctataaacaaaaagcagtaaaatcattccatctattgaaatgattcactgcttttttaagtttatttggcatactttagctgaaagtcacttaaacccctttacgttaagagatataatgaagtttcccatcaaagttcagttccctcagtatgtatacattccgtatacccatctcacaaatccatctataatacaaactatcattttaaataagcagaatttaccctgtcttccacacaaactgttttcgtcactttaatatgccctctattcaaaaaagtcactcataacaaattgcgtattttaataaatttagcaatgccatttgcatgctgcaaaaatactcatattaatatttatattttatattatttaagttttttaaatccatatttttataacacttgttatgtgataaaattaattttatatataaaatcttaagattcagattatttaataacaaaggagatagtgatatggatgttttaactattgaacatttaacaaagaagataggcaacaaaacgattctcgaagatgtatcatttaagctgaaacgcggacaaatagttggtcttgttggagcgaatggtgcaggtaaaacaactttaatgaaagttatattaggttactctagtttccaaagtgggaattttaatgttattaacagcaaggacagtaaaaacaatatcggtgcattgattgaaaatccaggaatatatccttttatgtctggatatgaaaacttgaagttattgaacgaatcaaaaaacactcaagatatcgataaaattgtctcacaacttcatatggatgaatacatccataaaaaagctaaaacgtattctcttggtatgaaacaaaaattaggaattgctatagcatttttaaatgaccctcaatttattatcttagatgaaccaatgaatggcttagatccaaaagctgtgcgagatgtacgtgaattgattgtccaaaaagcgcaagaaggtgtcactttcttaatttcgagccatattttaagtgagttagttaaaatcacaaactctatccttattattaacaaaggtaaaattgttacagaaacatcggaagaagaacttaaacaatttaaagataatgatttagaaaatgtattactagacatcatagaaaaggaggatcaagcataaaatgggaactttaattaaacaagaatgtttcaaattatttaaaaagaaatcaacttttatcgcacctattgtctttattctactaatggttgctcaaggttatatcgctacaaaatacaatgaaatttttacgccacaggaatcttttacatctgcttataatggtttttcatggtttgcatttttattaattattcaagcaagtacaatcatttcaatggaatttcattacggtacgattaaaaatttactctatcgtgaatattcaagaacaactatgattgttagcaaaatcatcacattatttattatttctttaatttattttgttattacaattattgcttcaattgttattgggtctttattctttaatgatttaaatatatttgaaagtagcggtaatcaattatctttattgaatcaattattattagttagtttaggcacatttgttggcgtttggttagttttaagcttaacgttgctattatcatctgcaactaattcaacgggtgtagccattgctgtaggtattgttttttattttacaagttctattttagcagttattcaaacggcacttttagaaaaaatagactggctaaagtggaatcctattaatatgatgaatattatgcttcaaacagttgaaaaaggctttagtaagtcgacgaaattagaacttcatgaattgtttattggtaatattgcttatatttctattttcttaatacttgtagtatttattttcaagaagaaaaatatttagtaacttaaagtattagatgtctaaatacacacatattccatcgtaattcaaaatcattttcaaatcccttcacccaaataatggtgcggggatttttgatatatcagcatgccactcattctatctttaatatatttcaaaatacccccacttgtaatgtacaaaatatgctcacttaaacgataatcgtatctctgccaagctatttcaactctgcttaatataaaaattattctctaggatgggatgcttatatctctatcatgatatttcaacgccgcttcaacaactttatcacttcatatttatgcgggtacacttcaactctactaatatgaatgatacaaccacagattctcaacactaaaattcacaatatgtttactctatttttatcaattcaagcatacttattgaaaaatgttaacgttttcttgataatcattgtaagcgtattaattttacaaaccaatgattgaaatatactacaggagtgacacacaatgactcaaattactgaaagagaattaaaaaagaaatatttggatttattatctcaacatttcgatactccagaaaagcttgcgactgaaattattaatttagaatctattttagaattgcctaaaggtacggagcatttcgtcagcgatttacatggtgaatatgaagctttccaacacgtattacgcaacggttctgggaacgtgcgagcgaaaatcaatgatattttcaaagacaagttatcaacgaaagaacttaacgatttgactgcccttgtttactatccagaagataaattgcaacttattaaatgtgattttcaaaattatggacaattaaatgtttggtatattacgacgattgaacatctcattcagctaattaaatattgttcttcaaaatatacgcgttcaaaacttcgacgtgccttgccggagcaatacgttttcatcgtagaagagttattatataagaacaacgaatttaaaaataaaaaatcttactacgaaacacttgtaaaccaagtgattgagcttaagcaagcggatgatttaattatagggcttgcatattctgtacaacgcttagtcgtcgatcatttacacgttgtcggtgatatttatgatcgtggcccgcaaccagataaaatcatggacacgctgattaattatcattctctggatattcaatggggtaatcatgacgtgctttgggttggtgcttatgcagggtctaaagtatgtttagctaatttactacgtatttgtgcacgttatgacaatctagatatcgttgaagatgcttacggtattaatttaagacctttgctaacattggccgaaaaatactatgatgcagataatcctgcttttaaacctaaaaaaagacctgacaagcatgaacgtttaacacaacgcgaagaaagtcagattactaaaattcatcaagctattgcgatgattcaattcaaactggaaataccggttattaagcgtcgttcaaactttgaaatggacgaacgacttgtacttgaaaaagttaattatgatactaatgaaataacagtgtacggaaaaacatatccattaaaagatacatgcttccaaactgttaaccgtgataacccagcagaattactacctgaagaagaagaagtcatgaataaactattattgtcattccaacaatctgaaaaattacgtcgtcatatgtctttcttgatgcgtaaaggctcactttacttaccttgtaatggcaatttactcattcacggttgtattccagttgatgaaaatggtgagatggaatcattcgaaattgatggtcagacatacagtggccaagagttattagatgtgtttgaatatcatgtccgtaaatcatttgatgaaaaagaaaatactgatgacttatccactgatttagtttggtatttatggactgggaaatattcttcactatttggtaaacgtgcgatgactacgtttgaacgatactttattgcagataaagcttctcataaagaagaaaagaatccgtactatcatcttcgtgaagatgtgaatatggttcgtaaaatgctcagtgatttcggattaaatccagatgaaggacgcattattaatggtcacacaccagtgaaagaaattaatggagaagatcctatcaaagctgatggaaagatgcttgtcattgatggcggcttttcaaaagcttatcagtcaacaactggcattgcaggctatacattgttgtataattcattcggaatgcaactcgttgcacatcaacaatttaacgcaaaagaaaaaattctttccgaaggtatcgatgaactttctataaagcgcgtcgtagacaaagagttacaacgtaagaagattcgtgatacaaataaaggtaaagagcttcaagctcaaatagatattttgaaaatgttaatgcatgatcgttacttagactaaagacgacatttggtgcatgtatcgtgcacttatttagtggtgctgtgtttacgcattggctacgcaaatgcgatggtaaataggtgacctagctacaccgaaaaaatcccctcactattgcgagtagtgaggggattggtgtatctatgctagttccttgttaactgtattataacaacttcacagcaaaaaaatgcaaaattaactaataaattaataaaatgaccgacgcccttgcttctactccaatttaacaaaatactatattagtactatatttttcattcacatgtatgttacattttctatattacttaaaattacgaagggacatttttaaatcatgcgtatcttaaaagagtccattattgtggcatttgcctttgtgggtgttgtcgttggtgccggctttgctactggtcaagaaattttccagtttttcacaagtcatggcgcatatagcatttcaggcattattgtgacaggactattgattactttaggtggaatgattgtcatgcatacaggtcatcatctaaagtctagaaatcattctgattcaattaactatttcttatacccctctattgcaagaggttttgatattattttgacgatgtttatgttgtctctagctattattatgactgcaggtggtgcttcaaccattcatcaaagtttcaacttaccgtattggctgagcgcactcatattagtcgcctttattttagcaacactgtttctaaaattcgatcgtttaattgctgtgcttggaggtgttaccccatttttaattgcgattgtcattatgattgcggtctactatttcacaacgagtcatcttgattttactgccgctaataatgatgctcagattcataagcagaaatcattatcacctggatggtggtttgatgcgattaactatgcaagcttgcaaattgctgctgccttcagcttcttatcagtgatgggtagtaaagttaagtatcgtgactcaacgttatacgggggcttgattggcggtttaatcattacatttttactcatgatgattaacctaggtttaatttctcaattcgataaaattaaacacgtcgatttacctacattaaaattagcgacacaaatgtctccgtcaatcggtattattatgtctgtcattatgatacttgtcatctacaatactgttgttggattaatgtatgcatttgcgtcacgtttcagcgttccatttagcagacgttacttcatcattattattacaatggctgtcatcacttatattagtacatttatcggtttcatttcattaattggaaaagtattccctattatgggattgttcggtttcatcttactcatacctgtactctataaaggtttaattaagcgtattaccggcaaatctcatatcgattaaaatatctatactattgtaaaatttagtacaacacttcaaaatcaaaaaagcgggcagatgaaaagtgaaaatcttttccatctgtccgcttcttaatagaactgttatttcccaagtatttgttgaccagccgttaatccagtttctgtaatttcatgaccattcacccaaacttcttcgacttgtgccccacgtgtcttaaacaagttaatgacttgttcacttgcagctaatggcacaattggatcatgtttgcccatagaaagcaacacactgacatctgataaattctttgttgacgttacttcaattggatataacggtgcatataacaatgcttttttaaatggtgcttctgaacgcaacattaagttaatcgctatatttgatccatttgaaaatccaacaagcacagctttttcaatatcaaaatcataacgttcagcagcttctttaatgaacgctaacaattcttgtccacgaaatgccaaatcttcttcatcataaacaccttcaccaagacgtttgaaataccggttcatcccattttctgaaacttgtcctctaatacttaacaagtgataatttccattcaatgcttcgcctaatggtaataaatcgaactcatcaccacctgtaccatgcaataatattagcgttggcgcaccattttctccttctctaaaaatatgttccatcacaaatccctctcattccaattaatcatgttgacgcttcgtattaaaaggtctaacttccgattctatatattctcttttgttttctaaaaatggtggtaaggataacccttcgcctaatgtttcataaggttcatcttccataaatcctggtccatctgttgaaatttctattaaaatatgccccacacgtgcatataatgcttcaaaatagaaacgattaacgatgcctgagttgttaatacctacctctttatatttcgttgcccacgcttctattgcatcatgatctttcacacgaaatgacacatgatgtacctcaccataaccttgacgtgctgctggccctttatcatcttttattaagattacctggccaccattgcctccttcgccaacttcaagtaatgcgacattatcttcatgcgcaatagttgtcataccgtaaacagtctctaaaatatttttaaagtcgtcaaaataacttactttaatttcaatgggtcctaatccataaatcgctttatcttctggcaccggtccattcttccatggcacaccaggtgctacaccttcatttaactcatctgaaattaattgatacacttggccatctacttcttcaaatggcaacacttttttaccaaatagttcttgaataccttcgtgtttgacaccaaactcatcaaagcgctgttcataatatgttaatgcgtcatcgttaggcactctaaaagacggtcttgtaatggaatttgttcctgcttgccctttagtaatatttggaaaatcaaagaacgtcatgtctgtacctgccgaacctacgtcatctgcaaaaaatgtatgatacgtataaatatcatcttgattgactgtctttttaactaaacgcatgcctaatacttctgtaaaaaatttataattacgttctgcatcatctgtcattgctgtgacatggtgaatacctagtaattcatgattatttgtcattttatataccctctttgtctttttagtgtatttatctcgaaaccgagatattttaatgtaaatttttagtgcacgccttacacttctgtagattgtgcacttagtttcttaaatgcttgctgtaagattgttaattcatcctttgttaacacatcaaacgcttttgtcaatgtctcagcatgcttagggaaaatatctgccatttgactttgccctttttcagttaaataagccatatatacacgtttatcatctttatccttttcacgtgtaatccaacctttgtcctctaattgacttacaacatatgaaatgctgctacttgcaattaatacgcggtttctaatacgttgaattggttgcggacctttattataaagcaactcgagcactgcaaattcagtaatatttaagccatatcgctttacgtcttcttttgtaatttgctctaatgtgtctaacgccctattcattccgacaaagacattgagcgattgtttcgttcgatccatatcatcaccaaccttttaatttatttcgatttcgagataaattatatagctgattggatttaatgtcaagataggtgttttcatctttatttcaaattgcgcttaataaaaacgactacataaatgtggcaatgtcgtcacatgactgtcatgcacctttgacttcgtttaagttaaaatagaatagggaaacattataatcaatcatgataggagttgatatgtatgagtaaccttgaaatcaaacaaggcgagaacaaattctatattggtgatgatgaaaatcatgctttagctgaaatcacataccgttttgtggataataatgaaattaacattaatcatacaggcgtatctgatgaactcggtggtcaaggtgttggcaaaaaactagttaaagcagttgttgaacacgctcgagaaaataatttgaaaattattgcctcatgttcatttgccaaacatatgttagaaaaagaagattcatatcaagatgtgtatcttggttaaataaacctcgcgatggtgcgccagtgccatcgcttttttatttgttcgtatcaatataaaattgcgaaacatcatgttattttgcatttcaaactttttgctgtcaattcattttcttttctggtatactttttatactaacttatagaaaaatagaaaacgaggcgatgcataatggcatttcacgataaaacagcaacacaagtgacaaacattgaactgaacgtaagagacttagacttaatgacaacattttacaaaaacattttaggactatcagttaaaagttctgacgataacacaaccgtattatcagttggtaatggtggccacacactaacgttacatttattagaagacggccgtcagacttccccacgtgaagcagggctttttcatatagcatttttattaccaactactgaggatctagctaacttcttatatttcgtggcacaaaaaaatatgggcatcggcgctggtgatcatttagtaagtgaagctttatatttcaacgaccccgaaggtaatggtattgaagtctatcgcgatagaccttcatcttcatgggaatggcaaaatggaaaagttaaaatggatactttagaagttgatagccaaaccttattaacacatcgtactgatgaaggttggcaaggaatgccagcaaaaggcatgattggacacttacatttaaaaacacatgatttggacgcagcatatcaatgttacattgaacaattaggattccaacatgtgtctgattttccacgtgcgctatttatgtcaacgaatcattatcaccatcatattgctgctaatacttggcaatccaatcaagcaagacaaaacaatgcacaaagttatggattaacacatgttgatatttatcaacccgacgcctcaacacatacatttacggcaccagaagggtttgacatcacagttcattcaaatactgaccttgttccagaaaaataatcatccatactttattaatacaattttttcacgcaaaagcctgcgattcatttatgtaatcgcaggcttttttattgctaactttttaattttatatatttagacatactgtattctatttattcttttggcccaacccattcaataacatcttcatatgcttggcgtgttttatttttcggtggatcttgttgtctgtagccaaatgcgaccatcactgataaaccaaattgctcagtatctaagatacctttatttgctaaaatgtctgtcactgtatccagactaaaaccttccatcggacatgaatcaatacctaacaatgcggctgtcgtcatcatattgcctaatgcgatatacgtttgtttacttgaccagtcatacaaggcttgatcattatcagaaatatggaaatctgcttggaatgcatcgaatttttgttcaacagctggaatcgtttgtgcctcatattttttaatatctcttaacatatgttgtacatacggtgatcttgacgttacatttttacgcgcaaaaattagcacaaaatggctcgctgtatctaattgtttcgctgctccccaactgtgcgcttttaattcatcacgtaacgcttgatcttgaatcacgacaaacttccaaggttctaacccaagagaacttggagacaatctacctgactctaatattgtttcaaaatcttctttcgaaactttcttttgtggatcaaattgttttgtcgcatgtctaaaatgaaatgcatccataattgtttgattcatattgctcattgaacatagcctccaatttttatatttattgctatacaaattatacttcatgttttaaaaagactaaagtaatccgtttagaatctattataacttgtgcacacgttataggttttctacaattaaacacgtttttgaattttggaaaatttagtgttataatatatttgtgatatttttcacaattaaattgtggcgtgattttaatgtgcataatctttaatttcactcatttacttttcaatcttttaaaagcgaggtttttaataatgacaaaaattatgttctttggtacgcgtgattatgagaaagagatggcattaaattggggaaaaaagaataatgtcgaagtaactacttctaaagagctattatcaagtgctactgtcgatcaattaaaagattacgatggcgtaactacaatgcaatttggtaagttagaaaatgacgtttatcctaaattagaatcttacggtattaaacaaattgcacaacgtactgctggatttgatatgtatgatttagatttagctaaaaaacacaatattgtgatatctaacgttccaagttattcacctgaaacaattgcagagtattctgtttctatcgccctacaattagtgcgtcgcttcccagatattgaacgccgtgtacaagcacatgattttacttggcaagcagaaatcatgtctaaaccagttaaaaatatgactgttgcaattatcggtacgggtcgtatcggtgctgctacagctaaaatatatgcaggatttggtgctacaattacagcttatgatgcttatcctaataaagatttagactttttaacatacaaagacagtgttaaagaagctattaaagatgctgatattatttctttacatgttccagcgaacaaagaaagctatcatttattcgataaagctatgtttgatcatgtgaaaaaaggtgcgatcttagttaacgcagcacgtggtgcagtcatcaatacacctgatttaatcgctgcagtgaacgatggtactttgttaggtgctgcgattgatacttatgaaaatgaagcagcatacttcacaaatgactggactaataaagacattgacgataaaacattattagagttaatcgaacatgaaagaattttagtaacaccacatattgctttcttctctgatgaagcagtacaaaaccttgttgaaggtggtttaaacgcagcattatctgtcattaacactggtacatgtgaaacacgtttaaattaatatatatttaaaagcaaaggcgcgccatgtgcctttgctttttattttgtatatctgtatcaaaatcgatttgattaaaatccgctttattttatcatctattcaaatgattgtagtgcgcttattttactatggcattattgcctaacctgtttgagatatattaatatttgatgattcgtattcaaagttttcatttaacatgtatttagtatcatgatagctgcttcattgatgatctactacctacttttcaacacttcttgttcgataatcgttaaaacaccctgcttatcattacttggagcgacagccgaggcaatattgaacaattcttcatcatgactattttccatcacataactatgcttagcgaacgcaagcatatctttatcattattcgcatctccgaaggccatgagctctgaagaagacatttcccatttatctaacaatcgttttaatgcctgccctttagtcatgtttggcataataatatcaatactatcgtgcccacttgagacaagtttaatatcattgctgaattgcgtcgctacttcttcgtcaacattcggatgcgtctcacgattaatattgaatgcaattttgacataatcatcctcaggtaattgttgtagactgtcaatttcttttaactgatgataataaaatctcgtatcttctttaaatgcttcagaagtatgtttcaaaatatacgcgtttttcaaaccacagatgacgagttgatcaatactttggttcatatttaagtaatcgacaacttgttgaaacacctgacgattaaagcttttataattatataactcattgcctttataaataactgcaccattttcagatataaaatacatatctctatccccgaaaatagacttcaacttcgcatattgattgccactcgcagctataaatgtaatatctctatttctaagttcagtaaaaatcgcttcaaatcttggtttatcgtatgtctttttcgaatctaaaaacgtcccgtccatatctaccgcaatagccttaaccatgattatcctcctcattgctcttttagtcgtcttcattatatccatctcatgacaggcaatgaagtttgtcataccacaatgaacctatattcacattttgaaattgctttcatatatgcaaaacatattacactggatatagcattcagagacgaacataaatttcagaatattgtaaaaaatataacgatatatttatcatttggacaaaatatagtgcgatatactaatttataacatctatacataatgtgaaagaatttttaaaaatacaattaaatatcggtgtaataaatccctttatacataggagttgtatacatgaaactaaataactattctttaaaagttaaaaacaaacaactagttgacaattgtgatttaaatttctatcttggtcagatcaatcacattgttggtaaaaatggtgtaggaaaatctttgttagctaaagatttcttactaaataatagtggaaatatccctaagtccatttctcaaaatgtaaccttaatatcaagttcatcgaatattcctaatgatataactaaagactttttattatcattgttaaaaacaaaattcaaagacaacctacaaaccttcgacaaaatttataaaattctaaacatcgaagtaataccgtctaacatactattaaaaaacttgagtgatggtcaaaaacaaaagcttaaattattaagtttcttattggaagatcatgatttaatcatattagatgaaattacaaacgctttagacaagaaaacagttaatgaaatttatgaatttataaatgattttattcaaagccatcaaactaaaactattatcaatattacacataatttatccgatttaagtgctttgccgggtaaatactttatttttaaagaccttcaaatagaagagtaccaatcaaaagaagaagtcataaatgattacattaatttataattgaggtgtccactttgaaattagaatttaaaaaaagtatttccaataaaatcatttacacgcttggtgtgctattcatattccttttcttacttgggtattttttaccaataggtatagacaaagttaaaaatttaagctatagccagtttttcttcagttcatatactgttgcaacgcaattagggttcttactattttcatttgttattgcatattttattgataaagagtattcgaataaaaatatcctgttttataaattgattggagataatatctttaccttcttctataaaaaggtagcagtgttattttttgaatgtttagtgttcataattctaagtatcacaattatttcaattatatattcgaatttctcacattacttactattaataatcttattttcactcgttatcttacaatatatcttagttgttggaacgattagtatggtttcacctaacattttaatcagcttaggaatcagcattgtatattggattggttcagtcatcttagttgccattaataaaaatatatttggtatcgttgctccatttgaggcgagcaatacgatgtatcgtgccgtagaaaaaatattgaataacgagtcaacatttatgtgtcctactgaaattataaatacagtatcattcttcgttcttctatttatagttaatactattgtcttattactaagtagaaagagatggttgaaaatcggtatgtagtacataaaaaggagcggcatccattgtcgcttctttttattatgtatttttacaatctccaccaatgacacgtcgttattgttgcctcacaccaaacaaaaaacagtctcgcaatcaagactgttttccactcaatatattcattcattagcgtaatggattatttgacttctgtagctacaaagattttacgtttttcccaaacgcctgtcttttcattgtaatcatcacaagtaattaatgttaattgtttatctttacctttttgttcatctagaacttctacatctgtaggtttaacatctcttatacttgtcattttatacttacgtgtttcattaccaactttaaagtaaaccatactaccttttttggctgctttaagatttgtaaattgatagttcggacggtcaatgaaagtgtgtcctgcaattgaaatattttgatcatctagtgattcattttcttctgcaaagcttacacctctatttaattgttcaggtgttgctggtcctggatatactggttctttaatatcagcatctggaatttcaatatatcctgccactttcgatttatctttcggaatttgaggtttagcttgctgctttttatccttactcgcctgttcttttacatttttatcatattgttcaatcttttcatctttatctttatcgtgaagataattatcgatatgtggtttagcaaacaaatatgctgccactaggataagtaccacaccagcgattgtcattaatcgatttgtccattttttcatacgttaaggctccttttatacatttcacaatgcctattaacatttcatatagtataccattaatttcaaaatgactcatagcaattcattttataatattaaatttgcacatatattgtcacgttagatttcattacacatatttgcattcaaataacgaaacgtttttaatacatattaagggggaattattatgattcgatgtgctaaaaaagaagatttaaacgctatattagcgatatacaacgatgccattattaatacaacagctgtttatacttatgaaccgcaaaccatagacgaacgtatcgcatggtttgaaacgaaacaacgtaatcatgagcctatctttgtatttgaggaaaacggaagtgtcttagggtttgcgacgttcggttcgtttagaccttggccagcatacctatatacaatcgagcattctatttatgtcgatgcttcagctagaggaaaaggtattgctagtcaattattacagcatttaattgcagaggcaaaagctaaaggttatcgtgcgctagttgcaggcattgatgcttccaacaaagcgagtattcagttgcatcaaaagtttacttttaagcatgccggcacactgaccaatgtaggttttaaatttaatcaatggttagatttagcattttacgaattagatttacaagactagtaatctttgaatcacataatataaacaagacaaccatgtcaattcacttaacataacaagtcaacatataaaattttaaacttctcagggacaatttacatcgtcccttttatttattcttttcaaatactatccccatagctttgatttaacgctttttctcaataacaaaacgaatatagtagaacatgaaaacgataatcatgctgagcgataaagatttaaataatagattgacccacgttccctcagtcgtatatccatatgtaatcgttgtgttaatgatgaatgctataaagatgattgatagtcttagcatatcatcactccttttaagttattttagatatacgggggcgcttttgcaatcactattttgatgagcatgtattttccataattttttcaactttatgaaagaaaattaagaagcatttatctggtactaatgatccagacagatgcttcttttttatcaatatcttattgttatctcattaattatttttaaccatatcttcagctgtgccaaagattttacgtttaattgcttctccagttggtgtacctgctaatccacccaatccagtttcacgtaatgatgcaggaaggttacgaccaaccttatccattgcttcaataacttcatcaacaggaattctactttcaatacctgctaatgctaaatctgctgaaattaaagcgttacctgaaccaattgcatttctcataacacaaggtatttcaacaagtcctgctactggatcacaaactaaacctaataaattacttatcgctagtgccattgcatgcccagaggcttctggcgatccaccgaaaatagctactgctgcagctgccgccattgcagaggctgaaccaacttctgcttggcacccacctgtcgcaccagctacacttgcattgttcgctacgacacgtccaaacaacgctgatgtaaataagaaatcaatcatttgatcttctgttaagtcatgtgttttttctaatttaaaaagtgcaccgggaatggtacccgaggaaccagctgttggcgttgcacaaataatacccatcgcagcattgacttcatttgttgcaatggcacctttgactgcatcaatcatttcatatccagacaaagcatgatgtgattcattataatcacgtagtttagcagcgtcatgaccagtgtagcccgttacactttcaacgccatcacctgtcgtccctttgattactgcgtctcgcatgacatctaaattttgtttcatttgcgctcgcacttcatcacgtgatttaccgcttaattccatttcttctttaaccatgatatccgcaaatgacatattattttctacggcataatctatagtctctctaattgaatcaaacatgtttattccccctctaatttatataggaaacgtttacgtcactgtatttctctttaattgtatttaatgtcgattctgagattgctttatttaatggtattacaaccaagcatttatcttcatctattttaataaattcatctttacagtctaatttcatatcgttgatatcattaatgaaatgatttacttgtgctttagtcatatttccgtcaacaactaaaattggtaatccatgatttaaatctacttctagtccatttatatgaatacctttaattttaattgtaccaccaccgattgaaataccgataatttcaatgtagcgaccatcattacgagatgatttaatataagcacagtttggatgttgaccaatactatcgccttcttcttcgataatatctattttaataccatcatcagctgcaatttctaatgaagatttaattcggttatcaaatgttgaatagcccattgctccacccacaatagcgacatctgtaccatgtccttggtgtgtttgagcaaatgattcataataatgtatttcaatatttttaggaatatttcccaatattgcgcgtgctgaattcccaatctttactgcaccagccgtatgagaacttgaaggtcccatcataactggtccgataatatcgaaagcactttgataatcatagctctttgccataattaaacactctccttaatatgattctttttgctcggcattttaaagttgatattcattaaattaaacttattaattagtgttccaataatataggctaagacaatgctgacaataatcactgttgcgattgttacaattgatgtcactgcattattaaagccaaacaatacgatggcacctgcaattggtgttgccatacctttgacacctattactagtccgctaaatgtcacgatacatgcgttgacgaccccaatcagtgcatttgtaccatatagttgtactggatattgcgctattaaatcaatttgcgtcaatggctcaatacaaactgcaaatgcttttgacggtccaccaatgtttaattttcggaataaaataaggttaacaaatgagctacctgtacatgttagtgctccaatagccataggaacacctgtcagtcctaataaacttgttaataccattgaacttagcggtgtcatacctgtaacaggaatcactagtcctaaaatgaccgctaatgcatatggattgttatcacctaccgcagtgacagcactacctatttgttttaatgttgctagcacaccaggtgtaatgattgatgcaagtccgaaagcaattgctggtgcaaataagatcaccacaattaagtccaagccttctggaactttcttttcaatccatttaattaaaaaagctacgccataagctgcgatgaatgctggtaataatttaaagtcatgtaatactaaaccaacaatgaccgcaaatactggtgcaacgcctaagtttaagcacgttagaatacctactgcgataccgcttaaacttcctgctaaatccccaatatcttgtagaaatttaatatcaaatacgccaccaatggcgtaacttaagaatgcttgtggtagaaatgtcgcacaagctgcaccggataatgcttgtagtccttgtttaccgtacggtgcatactttaaaaatagcgtcatgatcactaaaaccaagactaatgtgcctacacctaacagaatatccatttcccaaaaacctctctctatgtttattttattttcaaaccataaacatcgtacacccttaagaaaacgttttcaacttttatctgttatcaaatcaaatatttaagtgaaatatttcatatttgtgaaagatttttaaaatggattgtttcaaaaactacttatgttgtcattaatatttactaattaactttttgctctatatttcaaacagttgtgtgacagttttttgataacttttttacatctgaaagtaagtaatatttctaaaaatttttaatatttatacattttatctttcgagctatttattttttgtttttgtgctgtgtttataaaaccgcacactatattcaaaaataacttattacacatatatttgcaataagataattaaagtaggatattatttttagttttctgataggaatgatgatagtctataggttgaatctttactttttttaaagctaaatttacatcaacttaacaatgtctggttatactgaagatgaaaatatttagtataacttagtggaggcggtaaagatgcaattgagtcattccgttaaagttgcaatttctatctatttagcacttatctttataacgttcacttcttatttagtcattattttatatacgagtatgactggacatgatgtatcacatttcgtgttagatagtcagcattctcatcatggatctcttacgcaaaaacatttgagtcttcctgaaatctcatttaaatagtttatcctctgtgtttcaacattcatttcccatatcgattcatttatctatcatctagaccactacatcttagatgatttttttattttttcatttcactctttcttaaaagtcgatataatgaattaaatcattatcatacaccgacatattttatgttgttggtgttaagttttaaaggggtgagatacttggcgaataatcattcagctttgcgtttaaaaggaattatacttgccattgtcggtgcttgtttatggggattaggtggtactgtttctgatttcttgttcaaatataagaatattaatgtcgattggtatgtcactgctcgacttgtagtcagtggtattttcttacttattatgtacaaaatgatgcaacccaaacgttcaatatttagcgtattccaagatcgacgtatgttaggcaaattacttatcttcagtatactgggcatgttagttgtacaatatgcttatatggcatctattaatacaggtaatgctgcgattgcaacattactacaatacattgcgccagtttatattattatttggtttgtcataagaggcgttgcaaaacttacattatttgatgtgcttgctattatcatgacattattaggaacatttttattattaacgaatggttcattttctaatttagtcgtcaatcctgcaagtttattctggggtattttagctggtgtagcactcgctttttacacaatttatccttcagacctacttaaccgcttcggttcgattctaattgtcgggtgggcaatgcttatttctggtgttgcgatgaatttacgccatccaatttggcacattgatatcactaaatgggacatatcaattatattatttttaatctttggtattatcggtggtaccgcactcgcattttatttctttatcgacagtttacaatacatatcagcgaaagaaacaacattattcggaactgttgaacctgtcgtagccgttatcgcaagcagtctatggttacatgtggcattcaaaccatttcaaatcgtaggcatcattcttattatgattttaattttattactatcacttaaaagacaacctgaaacattagatgaataagaaaactctgataatcactttagcaagtatctactatttaacaatgtagctacattgtaggtgatatcagagttttttattttagttaataatatttttaatttggtataaaaagcgtcggcgctctggtattgggaatactggataaatatgaaattggtaatatccaggtataaagtcatgttctataccttttgcactcaacaattgtgataagttcaatgcatcaggatacagcacttcttttgtaccaacagttaaggtaattcgtcctaaaccatctaagtcaccgttaattggtgatactttgtaatcatctaatggtgtgtcacctgcccattgctcagctaaataaacactaccatcaacacctaccattggatctttctttaagtagtcaggaacttctggatggcgcatcgttgcatctaatactggtgaaatcaagacaatatgtcctggttgagctatatgcttttcttttaacaattgagcaaatgataaagcaatttgaccgcccgcagagtcacccattacaacgatttgtttagaatctgctacttgattcaataaatcatgatacaacttttcaaaaagcacatacgtcgcttgataatcttgatgcggaatcttcggatatactggcatgatgactttagcattgagtgtttctgcaagttcatcaataaattcgaaatgaattttgagtgggtcttggaaccatgcgcctccatgtgcgtataatacaacgcgttgatgcttatcttgtttatcgttaacggtataaacggttgaaccgaagtgcttatccactgttactggcatcttaaactgataattggtgccctcatattcacctgctgtctgtggcgccattttttctaatgctttcatcgcttcttctttatacataaaacgacgcttagctctagataatcgtataccttgttctaacatataacttttcacactgcgtttttctttaattctaatatgtgcgtatgccgctactaaaaatccaaacgcaagtgcagaccattttttacgcatttgtcgtcactcctctttgatgatttctactatagttctactgtaccatgctgattcttattactaccaatatttaccgggaaataagttatgatgtctacataatcatagcaatactaatcattttcaatactaacgctcatcgacatcgttattcacactatcattcatttgcttaagatgatgttcaaaacgttgcatatcgataaaacgcccttgacgatgcatttcttttccattcataaaaattaaatccacaggtacagtgaaaatatttaattctccagcaatagcttccacctgactttgattaatcacagctaatggcacattggggaatgattgcatcaagtcttcaatttgtggtaaaacggcatgacacacgctacactgatcgcgcatgacatgtacaactgctaacggatattgatgaataaattcacggaatgctacgacactatttaattgcttaaccatttcgaacaccttcttactttttatattttaaaatgaagtcattattttgttgctaaaatctcttgaaacacttgtggcacagaggttatcttcttatcgctcaatctgtaaaaaccgcctgtctgtgtaccaatacaatgcacgccatgtgcggacacaatttcaaactgaaacacccatttcatcttgcttgctttaactaagtaaatacgacctactggtttgtcatgtattgtgacaggtactttatattctgcttccgttttcataagtataggtgaaatgccttgattgatcattgttgagtaattcatgtgctgattaataaacgctgttctcaaatcttcgaaccatctaatataaacgatattactaacgacacccatcgcatcaatgtcgtaaccattcacttcgatttctttctctgcaactaatagaccttctgttgtcataatgacaaatctccttatcttacaaatagatttaaaatcatgttaatttatttttattactttcatgataaaaatacaagcaattgaactttattacgggaaatcaaacttttcaatgacgctattaatttggctagtcgcgaagatgcatttttctaaaatgtgacaaaaacataagcaatgttttctatatctaacactaatatttaccttattctcatcaacacacctgctatacatcattgcgcactaaaaagacagtagcttcattttaagctactgccttttgtaacgtattctctttcaactcgctacttcgcatacgcactatgaatgactaaaagttcattcatttgatatgctatttcattttcaatcattatttgactgtcataattagcttacctggatcagcatcttggacatcttcaatgacaagttctttattttcaagatttgtaataatcattggtgtaacgatgcttggtgcgtgcgctttcaagtatgctaaattcactttcattaatggttgaccttgtgttactttttcatcaacgttaatcagactttcgaatccttcaccattcagtttcactgtatcgataccaatatgaataagtacttcgacaccactttcagattctaatcctaccgcatgtttcgtagggaagattgttttcactgtaccatcaaacggtgctacaatttcacctttttcagggataaagccaacaccatcacccatcattttaccagcgaatacttgatcaggtacttctgataatggaatgatttgaccgacacctggtgcatagatgtctgttgttccaagtgcttctacgtgaactggttcatctgacatttcttcagtcactgtcgtttcacttggtttcgtaatttcaccactcataatcttggccatatcatgtttaatttgatctgattttggaccaaagatagcttgcatattgtttccaacttctaatacacctgatgcgcctaaagctttaatacctgctacatctacttttgatttatcaaccacttctacgcgcagacgtgtaatacatgcatctaaatgtttaatgttttcttttccacccattgcatctaagacatcaaatggtaattttgcgacactagagttacgaatttcagtttcttcatcttcacgacctggtgttttcaatttaaacttacgaattgcaaagtcgaataagaagtaatacacgatagcgtatacaataccgactggaataactaataatgcgtgtgaacgatcccagtttaataaaccatataaaatataatctatgaaaccacctgagaatgtcataccaattttaacgcctaataaatgcattactaagaatgatgtaccagctaataatacgtgaattccataaagtactggtgctacaaataagaatgaaaattctaatggctcagtgataccagttaaaaatgcagttaatcctgctgataacattaaaccacccacgacttttttacgttctggtcgtgcatttttataaatagcaaatgctgccgctggtaaaccaaacatcatgaatggatatttaccagtagtaaatgcaccagcagtaaatggtacgccatctttcaattgtgccatccaaatacgttggtcaccacgaactaattcacctgcgtgatttgtataacttccgaattcaaaccagaacggtgaatagaaaatatgatgtaaaccaaatggaattaatgagcgttcaataataccgaatataaacgttgttaatgttaaatttttatttaataagaaattcgataaactatttaatccgtcttgaattggtggccacgcaaagcttaaaaccacacctgttgcaattgctacgaccgatgtcacaatcggtacaaatcgtttacctgcaaagaatcctaaaaatggtggtagtgtaatattataaaatttgttgtaacaccatgcggctaaagcacccatgataataccaccaaacacacccgtttgtaacgttggaatacctaatactaaggcatgtgctggttctttcgctgcttgacttaattcttttgcccctttggcatatgagaaaatgtcatcaattgtaatgtgcaacactttccccattgttgcattcataattaagtaacctactagcgctgctaatgctgcaacaccgtctcctcctgctaatccaagtgctgtaccaactgcaaataataatggcaagttatcaaatacaacttgtcctgctgcttccatgaccgacgaaatcattacaatgatatcgttttttaaccatggtgcaatttctactaattgttcgttgtgcattgcgttaccaaacgctaataaaataccagctgctggtaaaatcgcaacaggtaacattaatgctttaccgatacgttgcaattgtccaaacaatttcttaaacatataaacatcccctatctcaatttccgcttccatgtacaaaaaagcaggcatgaacaaacaagactattctcatagtacggttgtttgctcatgcctgcattaccagtaacacgcaagtgatatgtaattcatagttattatacatatttgtaaaagcgttttcaacaactttttcacaattttatcatcaattcagtacaatcatttgtgataaataaacaaaacggcaattcccattttgttgaaatagaaattaccgtttttatagttcaattcaattgtgataacctttcaatcagttataagaaacgttttgctgcaactgaaataggtggaatttgatctaaatctaaatgtttatcttcagtaatagatctaaatgcccatttaccataaccaagcgcttcttcatttacaattttacctggtaatggcgcagcattaggatcaacataaacatctacaattgttggtacatcttgtgctagtgcctcttctacaatagcatctacttcgctagcacttttaattgtataacctttaccacctgctgcttcagcaaatttggcatgatccatatcagagaaatcaaccgcatattctaattcaccagcagcttgttgttcatatttaataaacgctaattgcttattatttaaaacaaacactgttaaaggtaaatcatattgtacagctgttgcaaagtcctgcatcaccatttggaatgcaccgtcaccagcaattgcgatggcttgtctatttggatatgcaatttttgatgccattgcacctggaagaccgcaacccattgtacctaaccaacttgaaatgatgaacttgttatttacaccaaggtttaagtatcgagttgaccaaactgttgctgtacctacatctgctgaaatcactgcatcatctttaataaatttattgattgatgccattaatcgttctggacgtaatggtttactattattatttttatcttgttccatccatttatcccaaaccgctttacgttctaacgttttgtttaagaatggtctttcagcaacatgtttaatattttcagttaactgatgcaacgcaattttactatctccaacaattcccacattaatattgaaacgatgtccgatatttttaggatttgtgtcaatttgaatggctttaatatttttcttaggtaagtaatccacatatggatagtttgtaccaaccataattaataaatccgcttcctgcattgtttgataagatgttttggtaccgattttacctaagttaccgatactatatggatgatcatccggcaagattgttttagctggtaatgaatgaatgacaggaattttagccatttcaataaattcacgtagctcatctttcgcatgtttcgcacctacaccaattaacatgacaggctttttacttttattaattaatttaaccgcttttttgatgtctttatattttggtgatactactgttggtcttgatgtatctactggtttattcgttgtatctttaattttttcagttaataagtcgttaggacaaataacaacagctacacctttttgttcatatgccgtacgaattgcttcgttaacgatttcaaacacattgtcacctttttcaatttggtgattataaacggctacatcttcacataatttttgtaaatttgtttcttggaatgctttcgttccaagtgctgtactattcgtttgtccagataatattaattgcggtacattatccattttggcatcgtacataccatttaataaatgaattaaaccagggccaccgatacttaatgccacaccgattttaccagttaattttgtgtaaccagcagccgctaagcttgctacttcttcatgacgtacatgataaaatttaaattgatctctcactgtacgtaaactatcgaccactgcgtcgattgaatcacctggaataccatataagtgatctatatcccatgcttgtaatgctttaactaatgcttcatttgcttttatttttgccattattactaatagcctccctttcttagtgtctttttctaattaatagaacagtatgattagaacaggtattaacaccgaactaataactgcagttaaaatcatcccaattgaactaaatgcaccagattcaatatccatctccagtgctttagctgtgccaaatgcatgtgacgcattcccatacgttaaacctttggcgatagaagattcaaatcttccaaatcgtaataacatcgaacctaaaatactacctattaaacccgttgtgataataaaaagtacggtcatcgtatctgtgccaccaagttcatgtgacacttctataccaacagcggctgttatagatcggggcaataatgttacaatgacgtctttagaatagccaaatgctttaagtgttaagaacactaacatgaaatttagcatgacgccagttaatacacttgcaaaaatgatagagacattatctttaattttctctctatttttataaagtgggtacgctaaacatacgaccgttgcgtttaaaatatggttgatccaactgccacctttcatatacccattataactaattccaaagataagtaagacaaaaataattcctaaagatgcaattaatgctggattcaaaaacggattcggatatttttgttgtaatcttttagcgaaataatataaaacgacagtcaataaaatcattaacaaggcttgcacgtaatcattcataagcatctatacctttacgttgcttatgtttaacagacattttttcagcaatataacctgaagataatgcaacgatacatgttcctatgataatgactgcgaaaaagagtatataatttagcgtaatttcggacgcaacatccataatacctacaactgatggtatgaagaaaaagaccatcgtctttaataaaaagtttgcaccgtcttctacccaagtgagcggtacaatcttaaattgtaatagtaaataaaataaaaatagaccaacaatactgccggctaagggaagatgaaaaatcttttgaatttctgtgccaatataagtaatcacaatgatgattcctagttgtagtagtagtttgattattaattggactttgtgcatggcgccatccctttctaaatatgtctaaattgttacaataactattataaagatgacacacacaatataaaaatactctttttttatgctttgtattacttttttctatggaaacgctctctaaatttcacttctttttcataataaaaagcactcattatttcaatgatccaagtaatgaggaacctcaaataatgagtgctttattaatatgttagcctaaacgatctttcaaaaattctatccatttcgttgtggcatgacttaattgtttatccttcttccaaacaacacctaattcccaatgtacatgcgcatcttcaatacgtaatagtttcacgtctccatttagttgctctgaaattgatgttggtaaaatactaatacctaattcattcgtaactaaatcttctataacatgccattgtgaaatttgcgctacagtattcggaacaaagccaacgtttttagcattttcaataattttatcattcaagtaaaagtctttattaaataaaatgaagtcttcacctgctaaatcttcgagtttaacagtttcatattttgcgagtcgatgctctctgctcacgataagtcgcaaatcttccttatctagggtagtataatcgaaaatatgatgatcgactggcaaagtggtcacgcctatatctacttcatcattgataatttgctgctcaatcgtttttccgccattttctattaaattatatgtaacatttggatattgttgatggaatgcaccaagaatattgataagaatattcatattcatgactgccgacatgcccatgtttatatgccctgtttccagtccattcaagcgttccatttcagatggtaaataatcatacagtgcaacaatttctttacttttctcataaaaaatttgacctgcatcggtaagtattaaatgtcttttacttctatcaaataagggcgtgcccatttcattttcaatatctttaattgctttactaattgtaggttgtgcaatatataatgatttggaagcattagtcatgcctccttgctttacgacttcaataaaatatttcatatgtttgatatccactaacatcatcctaactatttcaacacgtttatttcattatacacaacttcttaaacattcaataaatttagatttataaaattgctttataaaaagttttatgtaaaatacacattcttttatggtattatattaatggctcaagtttgttattcgaggtgaggtattgagcttttacgaatttatgcaaagttttcttggtgatgacacaccattaggtgaattggttgattggattaatcaagatagcaatttccctagagaagtgaagagccatagtgaaatattgtcatattttcgaacaaatccatgtcctgaaagcatctcagtacctgtaattaaacgggcactatcagttttcaaccaattcacaaatgtacaatgatacatgaatacatggagtcacatcatctcatgttagcgctctgattgcagggcgctgtttttaatgttatcgcttcatttatatgttgtgattgctattttctttcagttatagaaccacgtaccttttcttttaaatcattttatattttcccactaatatccgctgttaatcaatcctgacatccttgtatcactatgacaattaattgttatatacatgaatttctatattttatgaaaaaatccatttttattacaatttaacactttatatgacagcttcattacagttacttttattgttgattgcttgcattgttttctaaaaaaattttgctatcataaataacgttgaataaagaaaaaattaacttgggagataaaaatgaaatataaaaagatactttttcgtttactaattgcctttgcagtccttttctcagcagatttcacttatcaatccgtcgaacaaacgcatcaatcgcatgccgcagttaattattacagtaaaaaccaatgtacatggtgggcatttaaacgtcgcgcacaagtcggcaaacctgtttctaatagatggggtaatgctaaaaattggtattacaatgcacgtaaatcaaaatatgcgactggtcgtacaccaagaaaatttgctgtcatgcaatcaactgcaggatattatggacatgtcgcagttgttgaacaagtatataaaaacggtagtattaaagtttcagaatacaacttttatcgcccattaaaatacaatacacgtgtactaagcaaaaaggcagcacgtaactttaactatatttactaatcaaaaaacttctatcacgaacgcttcaatttcctgtatgcgtatgatagaagttttttattttttgttcatattaatttatttaagcgctatgatggactgacttaaacttttctttaaaatcgctattcgcatttgattattgttgacttcttaaatcttgtaaaatgcgttcagctgcttgtgtatttgcacggggttcttgcttcaatgcttcagctacttgcgcaatttcatcaccttttgcacctacaacaatagctaaagatttatattgtaagctcatatgaccttgctggataccttcggaaacgagcgcgcgacatgctgcaaagttttgcgctaaaccaacggcagcaactacatgacctaattcttgtgctgtatctacatttagcaattctaaagaagctttagcaattggtaatacttttgtaccaccgccaacgattgccaatgtcataggcacttctattgtaccaattaaacgttgacgttcttgatcgtatctccatgttgcaataccacgatattgaccatctttacttgcgtatgcatgcgcacttgcttctgcaccacgcgtatcatttcctgttgctaaaacaacggcatgtatgccattcataacacctttattatgtgttgcagcacgatgaatatcaacttgtgccaatacagaagcacgttccattcgtttggcaacctcttccccagttctctcgccccttgctaaatctttaacatcaatttcgccttgaactttaacaacggacgctgttgcatgattggataaaatactcattaaaatgtcgctttgcggaaattcattttttaaaaatgcagttatggcctctaaaatcgtattaagcatattagcgcccatagcatctttcgtatcaacaaatacttttaaagatagtaactgttgctcaggaaatgtatcaatagctatacgttggtaaccaccaccacgcgctttaatagaaggatatgcctcatccgcaattttatgaatttgcttttctaaagctttaatgtctgctgataatttttcagtatcgtcaacgccatcaaagacgatttgacctatcataatacgttcagaagataccgttttaaatccgccagtctgattcactagctttgcaccataactagctgcagcgacaactgaaggctcttccaccatcataggtacaacatatgccttatcgtccacaatgatattcggtaataatccaacgggtaatgcaccttgcgcgatgacattttcaattaaactatttgctacttcctcatcaattaatggatgattcaataaaatgttgaattgctcttctgataaccattgcttatctaccaattgttgtaacttttgttgacgagataaatgtcggaaatttttatctaaactttgcatggacatactccttttacttcacataattttttaacatttcaatcactactatttttaccataaaataacgttattcgtcttaaaattcaattgaataattattgttttaactataaaataaagcaaggtaaattaaaacgcttacaagaaacgtcaaatcatttttaaatttagtgtatttctttgtataagattagcatattctgatatgatacaagtgttgcttttataaatttgaaaggatgtaaaaccttatgacaataggtatcgacaaaataaacttttacgttccaaagtactatgtagacatggctaaattagcagaagcacgccaagtagacccaaacaaatttttaattggaattggtcaaactgaaatggctgttagtcctgtaaatcaagacatcgtttcaatgggcgctaacgctgctaaggacattataacagacgaagataaaaagaaaattggtatggtaattgtggcaactgaatcagcagttgatgctgctaaagcagccgctgttcaaattcacaacttattaggtattcaaccttttgcacgttgctttgaaatgaaagaagcttgttatgctgcaacaccagcaattcaattagctaaagattatttagcaactagaccgaatgaaaaagtattagttattgctacagatacagcacgttatggattgaattcaggcggcgagccaacacaaggtgctggcgcagttgcgatggttattgcacataatccaagcattttggcattaaatgaagatgctgttgcttacactgaagacgtttatgatttctggcgtccaactggacataaatatccattagttgatggtgcattatctaaagatgcttatatccgctcattccaacaaagctggaatgaatacgcaaaacgtcaaggtaagtcgctagctgacttcgcatcactatgcttccatgttccatttacaaaaatgggtaaaaaggcattagagtcaatcattgataacgctgatgaaacaactcaagagcgtttacgttcaggatatgaagatgctgtagattataaccgttatgtcggtaatatttatactggatcattatatttaagcctaatatcattacttgaaaatcgtgatttacaagctggtgaaacaatcggtttattcagttatggctcaggttcagttggtgaattttatagtgcgacattagttgaaggctacaaagatcatttagatcaggctgcgcacaaaacattattaaataaccgtactgaagtatctgttgatgcatatgaaacattcttcaaacgttttgatgacgtagactttgacgaacaacaagatgctgttcatgaagatcgtcatattttctacttatcaaatattgaaaataacgttcgcgaatatcacagaccagagtaatctgtgtatttgaaagacatttaaatataacctaaaaacagcagtaagacagcttttcattgaaatcgtcttactgctgttttctatttataatgcttcgtcttgaatgaattcattatgcctatttgacacagcattgaagttttcctaatgcctggatcatttataatttacggcttcgtgctatgttttggtacataaagctttgacatatcgatattctccaactctaacagcttaattttattattaatcgttccaccgaatcctgttaagctacccgttttaccgacaacacgatgacatggcacgataatagataatggattacttccgactgcacctccaaccgcttgggctgacatttttggcttatcaagcaccttgcctacttttttggcaatagcaccatacgttgttaacgtcccataaggaatctgtcttaattcattccaaacacactgttgaaaatgactacctgttggctttaaaggtattgtgatttcaggattgtcacctttaaaatacgcgtctaaccactgtgtcgcctctttaaatatcgctaaagacgtattttcttccctagtaccatcatcttgttgattttcaaacaaaacagcggtcagacttaccccatcactcacaagttccaatcgtcctacaggcgaatcatagtaacttttatataccataaacacacactccttttgcatcatcatactattcatttaactttatgaaaatgattaacactttatgctttttcaagatcaactattcacttccaaatcaaaattcacatagactaccaacacaatataccatttcttaattaactatgtatcaacacatacgtttcttaaccattgattaatatttacttttaaattcttacttacttcaaaaattacacaaaaagttcataaagtgcctacaatgcgccgtttttaaaactacaatggtggaaaaatagaattgccattgtttatagtttgcatatagtttcaatgtattttcttttacttattagtttaaaaatttagaggtgatgtttatgaataacaattttttcaatagtgatttcgattctattttacgaagaatgatgcaagacatgcaaaactcaaatcagactagtaacaagaaatactatattaatggtaaagaagtttcaccggaagaattatcacaatttacgcaacaagatgataatcattctgccgaacaaagtgcgcaagcttttcaacaagcagcactaagacaacaaggtcaacaaagtggcaatggcaattatttagaacaaattggtcgtaacttaacgcaagaggctcgtgacagattattagatccagtcatcggtcgtgataaagaaatccaagaaactgcagaagtcttaagtagacgcactaaaaacaatcctatcctagtcggagaagctggagttggtaaaactgcgattgtcgaaggtttagcgcaagcaatcgttgaagggaatgtacctgcagcaatcaaagataaagaaattatatctatagatatttcatctcttgaagctggaacgcaatatcgtggcgcctttgaagaaaacatccaaaagttagttgaaggcgttaaatcatcacaaaatgctgtgctcttctttgacgaaattcaccaaatcatcggttccggcgcaacaggaagtgattccggtagtaaagggttatctgatattttaaaaccagcattaagtcgtggtgaaatttcaattataggtgcaacgactcaagatgaatatcgcaataatatcatgaaagacgctgcattaacacgtcgttttaacgaggtactggttaacgaaccaagcgcaaaagatacggttgaaattttaaaaggaattcgtgaaaaatttgaaacacaccatcaagtcaaattacctaatgacgtattaaaggcatgtgtagacttatccattcaatatattccacaacgcctattaccagataaagcaatcgatgtgttagatattacagcagcacatttatctgcgcaaagtccagctgtcgataaagttgaaactgaaaaacgaatttctgaattagaaaatgataaacgtaaagcagtaagtgctgaagaatataaaaaagctgacgacattcaaaatgaaatcaaatcattacaagataaattagaaaacagtaatggtgaacatactgctgttgctacagttcatgatatttcagatactattcaacgattaactggtattccagtttctcaaatggatgataacgatattgaacgtttaaaaaatatttctaatcgtttaagaagtaaaatcatcggtcaagaccaagctgtagagatggtttcacgtgcaattcgccgtaatcgtgctggattcgatgacggcaaccgtccaattggtagcttcctatttgtcggtcctactggtgttggtaaaacagagcttgccaaacagttagccattgatttatttggtaataaagaggcactgattcgacttgatatgagtgaatatagtgatactactgctgtttctaaaatgattggtacaactgctggttatgtcggttatgacgataattcaaatacattaactgaaaaagtacgacgcaatccatattcagtcattctatttgatgaaattgaaaaggctaatccacaaatattaacattattacttcaagtgatggatgatggtaatttaacagatggtcaaggtaacgtcatcaactttaaaaacacaatcgttatttgtacgtcaaacgctggttttggtaacggtacagaccaagaatacgatgacattatgcaagaaatgaaaaaattcttccgtcctgaattccttaaccgcttcaatggtattgtggaattcttacacctagataaagaatcacttcaagaaatcattaatttattgttggatgatgtccaagtaacactagataaaaaaggtattacgatgaatgtctctcaagatgcaaaagattggttaattgaagagggatatgatgaagagttaggcgcacgcccattaagacgtattgttgaacaacaagtgcgtaacaaaataacagattattatttagatcatacagacgttaaacatgtggatttagatatcgaagacaatgaattagtcgtcaaaggtaaatcatgatactttaacatatagcgtatcaaaaaatgagcatcaggacgccctcgcctgtgctcattttttaaattatttcccaggaaaatgattcgctgtgtgttgttctgttccacaacaatcacgatcaatgtcacatgtaccacattttccttgtttcgaacgtttgaaaaatttaactaacgtatacaaggcatatccgaaaatcgctaaaaaaattaaaatattaataatgactgacactttaaccactccttaaacaaataaatgtccaacttgataaaagatgaatgttaagacatatgcaatgactagaggataggcaactgcaagtgccgtccatttccatgaataagtctctttacggattgctgccactgtagaaacacaaggaatatacaatagtataaatatcataaatgcatacgcagatagcggtgtgaattggttttgaatcacattaacaaggcctgcatcacctgatgaatagataatcgccatcgaacttacgataacttcttttgctaaaaatcctggcactaacgtagcacctgcttgccatgttccaaatccgagcggttgcactaacataccaaagaagctaccaactatatgtaaaaaactttgattgatattcacattgataccatgtggtcctacataacttaatagccaaatgactactgagccgccaaaaataaaagtacctgctttacgaacaaaccccttagccttttcccaagtactacgccacaacgttttaatggaagggacacggtatgttggcaattccacaataaagattgcattaccattttttaaaactgtcttagtaagtactgtactgactaaaaatgccataataatacctaaaacatacaagcttaatactactaaagattgattctctttgaaaaagatacctacgaacaatgcatacactggaagtctagcagagcatgacatgaatggtgcaattaatatcgttgttaaacgctctttttcattttcaatactgcgcgcagccataatactcggtacgttacaaccaaatccgataatcatcggtataaaagacttcccgcttaaaccgaaagattccataatacgatccattaaaaccgcaatacgtgccatataacctgaatcttctaataaagatataaagaaaaagagcacaacaatttgtggtacaaagactaatactgatcctacaccagcaataatgccatctgtaattaaatcttgtaaaaatggtataacgccaagataattcataatcgtcttcacactatccgtaaatgtaccacctataaatgcatcgagttgatccgacaaaggtgtgccaatccatgtaaatgtagtttgaaagatcaaccacataatcgctagaaaaataggcatccctatatatttatgtgttaatatcttgtctattctagagctgaaatattgcttatcttcatctggatacgttaccacgtcttgcaataacgtctcaatataatgattgcgtatacgttccatctctcgacgaacagatacagcctctacttgttcagcaacttgatcccgtaaactcgacaatttatttacaacctctgaattaagttcatttgcaatttgcatgttatttagtaagaattgaatcgcaataaatctagcttgatatttatcatgagatgtctctgtcattattatttgacacatatttttaattgtctcttcaatcttctcaccataattgattttaaaatgcggttgatacccttcccctagatgctttaattcgccaagtaaatgtttagttcctttgcctgtacgtgccacaactggaaaaataggtgtttttaactttttcatcaatttatgataatcgatttttatcccgcgctttgtagctacatcaatcatatttaatccgatgtatattggttgattaagttctaacaattgtactgttaattgcatatttctttttagttgactcgcatcaacaatgttaatgattcctgaaaaagaatcgtttaataaatagtctgtcactacagtttcatctttagaaatcggcgataaatcatatgtacctggtaaatcaattaattgtcctacattttcttttagcttccctacttttttctctaccgttacgccactccagttgcctatatattcatacgaaccagttaaagcgttaaacaaagatgttttaccaacattaggatttcctaaaatacaataattttccattcgtccggctcctattcttctaatgcaatagaacaagcatcgcaatgtctaatacttaactgttgtccgtttacttcaataatacatggccctttaaataaacatttttgtttaatcgttatgatagcgtcatctgttaacccaaaggcacttagacgatacaacatattctcattagcaatatccattcgctttattttataagccttattcatttcaccatttttaatgtttaacatactatttcgctctcctaatagaaataataatcattatcacttaaaaatcataacccttaaaattgtagctcgcaatactttatttaaataattttcatttttcatgtaaaatttgtgacattgcaaaaatgttttgtataatatcttccatgcaaaaaacctccactttaaatgtctatcaatgacatttaaagcggaggcatgtacatgttattttatgatttatttcttaagtttttttctaacaattgattgagcttttcaatatttttattcaactgttctatattcgtggcttgttgctttgaatttagttgatgtttgttttgataatccattaaagcatcatataagaacaatgaacttgctgattgctgtttcacttcttggtacaatgccatcgttttatcatctagtactattgaacgtgcatcatcttgtccatgtacatcttgatgtttcgatacatttgttgcaccttgtggatatactttaaaggttgtgtcgtatgtttccttactatctttagcttcagattcctgtgattcaaccgttttatatttttcaagtgcatgtccttcaatatcaactcgtggaataatacgattcaaccatgctggtaaataccacgaaccttttccaaacaatttagttaatgcaggaattaacatcattctgactacgaaggcatcaaagagtacaccaaacgctaatgccatacccattgatttaatcatgacatcttcttggaatacaaacgcaaagaagacactaaacatgattaatgcagctgctacaataacaggaccactttctttcaatcctactttgatagaataatcattatcccctgttttactatattcttcatgaattcgcgacataaggaagacttcgtaatccattgctaagccgaatagtataccaattgtaataaccggcaagaaggctagcattggtcctgtcgtttctataccgaataatcctttcataaagccatcttgcatcacaaaggttgtaaaacctagtgttgccattaatgacaagacaaatcctaaaactgcttttaacggtattagaattgaacggaagacaatcattaataagaaaaatgccaatacaacaattactgttgcaaataaaggtatcgcctcatttaactttttagacatatcaatattaatgacactttgtcctgaaatttccgttttaaatccataattatcttgcgcatctttattataatctcgtaaatcatgtactaagtcatttgtactttctgcattaggtccatgtttaggtatcacaaccatcaatgcataatcattatctttactcatttgtggtggcgtaacaatatctacatttttcttatctttaatatctttatatacagactgtaaatcttgttgtaatccttgtggatcatcctttttatctttcacatttatcaacatcggtatttggccattaaatccttcgccaaatttatccgagataatatcgtaagcttttttctgtgtagaatctgctggtttaacaccgtcatctggaatgccaagacgcatatgactaactggaatagccgctgcaactaatataattaaacctaataatactgctgcaagtgcattaccagtaataaatttagaccacggcgtatcaatatcttttttaaaattagactgcaatttgttcactttaatgcgtttatggaaaatgctaattaacgcaggtaataaagtcagtgcactgaatacagcaaatataacactaattgccgaagcaaaccccatcactgctaagaaatctataccaactagcgataaaccgcatacagcaatcacaactgtcacaccagcgaagatgactgcgctacctgctgttcccactgcaagtccgatacctttaacatagtctgtttcagttttcattacttgtcgatatctaaacaaaataaataatgcataatcgataccaacagcgagcccaatcattacggctaatgtcagtgtgacatttggtatatcaaatgcataagttaacaaactgataatgcctacaccagaagctaaaccaattaatgcacttataattggtaaacctgcagcaataactgaaccaaatgtgattaataacacaacaaaggcaacaataataccaactaattcagaattaccacctatatctgtagaggtcatacctgttcctgttaattctgtctgtacattatgattgtcacgtaagtctttcaaatgacttttaacattatctctagagtcatcttttaaagatgtttgactaacgtcatatgtgatatctgcaaatgctgttgttttatctttactaatttgcttattttcataaggatctgatattttatcaatgtgcttgtcatcttttttaatatcatctaacgttttcttaatatctttagtaatactcggttgtagaattccatcatctttagtcgtcttaaagacaacacgtatttgtgccttttcactatcttgattaaaatgtttttcaatctttttattcgtatctaacgactctaatcctgtcattttaatatcattgtcaaatttcggtgcatttgtagcaagtggtatcaatattgcagctacaatcactatccatgcaatgaccgcggaccatttatgttttgcgatgaatgtcaccatcttatataaaaattttgccaaagtatattgcctccttttaaaatcaacgttatagtttaactatacagtgtagattattgtttgattatagtatctatccccgacctcttaaagaatcaattggaaaattttgtatattaaactacacacaaaggagaaatgtagatgaaagagactgatttacgagttataaagacaaaaaaagcattgtcgagtagcttgctacaattgttagaacagcaattattccaaacgattactgtcaatcaaatttgcgacaacgcactcgtacaccgcacaacattttataaacatttttatgataaatatgatcttctagagtatttgttcaatcaattgactaaagactatttcgccagagacattggcgatcgccttaaccatccattccaaacgatgagtgatacgattaataataaagaggatttgagagaaatcgcagaattccaagaagaagacgctgaatttaataaagtattaaaaaatgtctgcattaaaattatgcataacgatatcaaaaataatagagaccgtatcgatattgacagcgacatcccagataatctcatattttatatttatgactcgttgattgaaggttttatacattggataaaagatgaaaaaattgactggcctggcgaagatattgataacattttccatagattaatcaatattaagattaaatagtaaattagaggctcataagcgttaccaacattcataataaaaacgatagtgtacacgttaatgaattcgtgtactactatcgttttttatttttatcgtgcttatcgctattaaaataactgatacacaacacataaactatgaagaaaaaaataaatccgctatctaaatgactttgactcagttgtttaaatgaccaaattgctaatacaattcccattattattgaaataacgtatctcacattcttatacctataagccttttctaaaaatatggttgctattacttaatttttaaagttataaataaaaagagccaaccgcaatggatggcccttgttcattatgaagtattagaacatttctgaaacaaccttttgttctaagaagtgtaataagtagtctgggctacctgttttagcgtccgtacctgacattttgaaaccaccaaatggatggtatccaacaactgctgaagtacagcctctgttaaggtataaattacctacatcaaattcgtttaccgctttaatccaatgctcgcgattatttgtaatcactgcaccagttaaaccgtaatctgtatcatttgcaacctcaattgcttcatcaaaatcgttaactttcacaaagccaacaactggaccaaaaatttcttcttgcatgattctatctttagatttaagtcctgaaatgattgttggttctacaaagtaaccttttgaatcatcagtgccgccaccttgttctaatttaccttcttctttaccaatttcaatataatttttaatcttatcaaattgttttttattaataactgggcccatatacgtattgtctacagtattgcccaacgttaattcttttgttagtttgattgacttttctaatacttcgtcataaacgtctttatgcacaattgcacgtgaacatgctgaacatttttgaccagaaaaaccaaatgctgacgttacaatagcttctgctgccatatctgtatcaatattttcatcaactacaatggcatctttaccacccatttcagcgataacacgtttcaagaagttttgaccttcttgaacaacggcactacgttcataaattctagtacctgtcgcacgtgatcctgtaaatgtaacaaaatgcgtatctttatgatcaactaagtaatcaccaatttcttttggatcaccaggaacaaagttaactacgccttttggtaatcctgcttcttctaaaatttccattaatttataagcgatataaggtgtatcctcagcaggtttcaataacactgtattacctgcaacaactggtgctaaagtcgtaccagccataatcgcaaacgggaagttccacggtggaattgtaacacctgtaccaattgatttatagaaatatttattgtgttcaccttcacgatcaagaactggcttaccttgagccaattccatcattgaacgtgcatagtattcaataaaatcaataccttcagctgcatcaccaactgcttcatcccatggcttacctgcttcataaaccataattgctgcaatttccgcttttcgacgacgaataattgccgaaacacgtaacataagctctgcacgatcatttgctgaccatgttttccaagatttataagcttcgtttgctactttaaatgcatcttcaacatcttgttttgttgcctttgatgcatttgcaatcacttgtgatgtgtctgcaggattgattgatttaattttgtcatctttgaaaatcttctctccattaatcactaatggtatgtcttgacctaattctttttccacgtctttcaatgctttcttaaacatatccacattttcttggactgaaaaatcgtaaccaggttcatttttaaattctactaccatgtacacttaccccctataaattttgaaagtggtttaaccctttgatttaatgatataacatcatttaaactcattttactatgagcaaggtcgcttttgcaatcgctttcatttttgtgttttatacctttcttctcaagcattttgaaaatgattagttactttttaaaatttagaagtgtcatgacaactaatttagtgtttcatcgttcaatgcttctgatggtacctcattatcaattttacgaacgactttacaagggtttccaaccgctaagctgtgtggcggaatatctttagtgacaacactaccagcaccaatcacactaccttctccaatcgtcacccctggtaacacggctacatgaccgccaaaccaagtattactgccaatatgaatgggtccggctttttcaaaaccttcatttctatgatgaaaattaagtggatgtgttgctgtgtagaatccacaattaggtcctataaaaacattatcgccaattgtaatctgtccaccatccataaaataacaattggtgtttacatagacattttttcctagtttaacgttccaaccataatctgtatcaaaaggaatcgaaatacttacattgtctgttgttgtttgaaataattgatcgattaattcctttcttttatttgtgtcactcggctttgtatgatttaattcaaagcaaatatctttcgctcgtgcacgttcattgattaagtcttgatcaaagtttgcatcgtaccatttttctgctaacattttttctttttcagtcattaaacctttcaactcctaatataacttatttacttgtttaaaagttaatcaaataaacattcgcctatgcaactaatacgctataacattatgaaatcatgaccttatcacccttatccatacaattctcacatcaaatactgctaaagtagtagataaattcaatactacagacgcattcattttttaatctattaacgtacaatgtgagtaagagaaatataaaggagtatgatagcgatgagaatattaattacaggcacagttgctatcttaatcattctaggtttagttaaaacgatacaagattacgaaatgacaaacgacacgagtcgtcagttgtcagacaacaaagatgatgataaagtcatccatcttaataattttaaaaatttacatgcgaaagaatttaacccatctgatttcttttaagtcacccaagaattgcaaatccagaagtcatttaagttttacctttcattcatacatcctttaatattaattacgacttcttttatatagatgctaaatagtgagattgttgtgcaatgtttgcacggcaatctctctttttctttttaaaattggtaaaagtaaaacgcaacgattgacttatatacctatagggggtacattagacgtgtaacaatgaatcacagggaggcaataatgtggctaatacgaaaaaaacaacgttagatatcactggtatgacttgtgccgcatgttcaaatcgtatcgaaaagaaactgaataaacttgatgacgttaatgcccaagtgaatttaactacagagaaagcaactgttgagtataaccctgatcaacatgatgtccaagaatttattaatacgattcaacatttaggttacggtgtcgctgtagaaactgtcgaattagacattacaggcatgacttgtgctgcatgctcaagccgtattgaaaaagtgttaaataaaatggacggcgttcaaaatgcaacggtcaatttaacaacagagcaagctaaagttgactattatcctgaagaaacagatgctgataaacttgtcactcgcattcaaaaattaggttatgacgcgtctattaaagataacaataaagatcaaacgtcacgcaaagctgaagcgctacaacataaattaattaagcttatcatatcagcagtattatctttaccgctattaatgttaatgtttgtgcatcttttcaatatgcatataccagcactatttacgaatccatggttccaatttattttagctacacctgtacaatttattattggatggcaattttatgtaggtgcttataaaaacttaagaaatggtggcgccaatatggatgtacttgttgctgttggtacaagtgcagcatatttttacagtatttatgaaatggttcgttggctaaatggctcaacaacgcaaccgcatttatactttgaaacaagcgccgtactaattaccttaatcttattcggtaagtatttagaagctagagcgaagtctcaaacaactaatgcgcttggcgaattattaagtttacaagctaaagaagcacgcattttaaatgacggtaatgaagtgatgattcctctaaatgaggtacatgttggagatacacttatcgttaaaccaggtgaaaagatacctgttgatggtaaaattattaaaggtatgactgccatcgacgaatctatgttaacaggtgaatctatccctgttgaaaagaatgttgatgatactgtaattggttcaacaatgaacaaaaacggtactattactatgacagcaacaaaagttggcggggacactgcgttggcaaatattattaaagttgtcgaagaagctcaaagttctaaagcgccgattcagcgattggcagatattatttctggttatttcgttcctatcgttgttggtatcgcactattaacatttatcgtgtggattactttagttacaccaggtacatttgaacctgcacttgttgcgagtatttccgttctcgtcattgcttgtccatgcgcattgggacttgctacaccaacatctattatggtaggtaccggtcgtgcagctgaaaatggtattttatttaaaggtggcgagtttgttgaacgcacacatcaaattgataccatcgttttagataagacgggtaccattacaaatggtcgtccagtcgtgacagattatcatggtgacgatcaaacgctacaactgcttgctactgctgaaaaagattctgaacacccattggcagaagccattgtcaattatgcaaaagaaaagcaattaacattaactgagacgacaacatttaaagcagtacctggtcatggaattgaagcaacgattgatcatcaccatatattggttggtaaccgtaaattaatggctgacaatgatattagcttgcctaagcatatttctgatgatttaacacattatgaacgagatggtaaaactgctatgctcattgctgttaattattcattaactggtatcatcgcagtggcagatactgtaaaagatcatgccaaagatgctataaaacaattgcatgatatgggtattgaagttgccatgttaactggcgataataaaaacactgctcaagccattgcaaaacaagtaggcatagatactgttattgcagatattttaccagaagaaaaagctgcacaaattgcgaaactacagcaacaaggtaagaaggttgcgatggttggtgacggtgtaaatgatgcacctgcattagttaaagctgatatcggtatcgccattggtacaggtacagaagttgcgattgaagcagctgatattactattcttggtggcgacttgatgcttattcctaaagccatttatgcaagtaaagcaaccattcgtaatattcgtcaaaatctattttgggcattcggctataatattgccggtatccctatagctgcattgggcttacttgcgccatgggttgctggtgctgcaatggcactaagttcagtaagtgttgtaacaaacgcacttagattgaaaaagatgcgattagaaccacgccgtaaagatgcctagattccttaataatgaaggattcgttggtgatcctgaggtaggctagtgattagctctataatgtcgcggtttacagttggtcttcgctccaactgcatatatagttacacttttcgcttggcgaattagtgtatcttgggagtgggacagaaatgatattttcgtaaaatttatttcgtcgtcccaccccggcaaggttgactagaattgaaaaaagcttgttacaagcgtattttcgttcagtcaactactgccaatataactttgtagagcattgaacattgatttatgtctcaggctctccaatattattataaataataagtacactatggtttacagttggatcttcgctccaactgcataagagccactaattattataaataataagtacactatggtttacagttggatcttcgctccaactgcataagagccactaattattataaataataagtggctctaaaaggaggtgaatgctatgtcacaagaaattttaaatgttgaaggtatgagctgtggtcactgcaaaagtgctgttgaatctgcattaaataatattgacggtgtcacttcagctgaagttaaccttgaaaatggtcaagtaagtgttcaatatgatgacagtaaagttgctgtatctcaaatgaaagacgcaattgaagatcaaggttacgatgtcgtttaattaggcaatattcaacgtcatcaacaccaaattaaaaaatcgaactgatgagaatcccaacaatccaaattatctcatcagttcgatttttaatttactcgtaacctagtatctccagtctgcaatacatctaatgttgcatctaatgcatcgacaattagattttcaactgcagcttcagtataaaacgcaatatgtggtgttaatatgacatcttccctgtcaatcaacgattctaacaatggatcgttcagtgttttgcccctttgatcacttgggaaaagtttgcgttcaaattcatacgtatcaagtgctgcacctttaatcacaccattgtctaatgcgtctaataacgccttagtatctactaaagaacctcttgcacaattgacaaatactgcgccctttttaaagtgtttaaataattcagcattaaatagataatgattatatttcgttgcaggtacatgtaatgtcacgatatcagcaccttcaaccgcttcctcaatcgtatctttgtaatcgacatacgttgcaattttagcattaggaaacgggtcgtatgcgaccacatcactttgataaccattggcaaatatatcggctactacacggccaattcgacctgtaccaataacagctacttttaaatctttaatggatttcgataaaatagtaggttcccatctaaaatcatgctctcgcactttcgtttgaatttgattaaaatgacgaaccacattaatagcctgattcacagcaaactccgcaattgaattcggagagtatgacggcacatttgacacaatcaagttatacttgtttgctaactccaaatcatatgtatcaaatccagcactacgttgtgcgatttgtttaatacctagttcatttaatcgtttataaacatgctctgataatggtatttgttgtgatagcgataagccatcataaccagcgacaccttcaacattgtcatcagttaatgcttctttagtaatatctacctcaacatgatgtttctctgcccacgccttgatataaggcatatcttcatcacgtacactcatgattttaatttttgtcattttaacatcacccttaactttattatttatataaatttgctaattctgttaatcttattgctgcttcgtctaattgctggtcatctaacgccaatgagattctcacataacgattaccattctctccaaatggtttccccggtgcaacaagtattgatttctctttcactaaaaattgctcaaattgctcgctgtcataaccagacggtgtttccaaccatacatatatgccacctttagcatgaacaaatggcaaatcaacttttgcaagcatggcttcgaatcggtcacgacgtgctttaaatacattgctttgttcttctaaaaaatcatcataatgattcaaagcatatattgcggcatcttgtaatgcaccaaacatcccagcatttgtgtgcgtttggtactttttcaaagcttgaatcatatctttattaccaactgcaaaaccgactctaaaacctgacatgttataacctttagacaaggaataaatttcaatcgcaacatctttcccattttccgaagcaagtatactaggatttttagcgtcgaaaccgaaagcaccataagcaaagtcatgcacgattttagtgtctgtatctttaaatttagctatcgcttcatcaaaaacttctttcgtagctgtcgatccagttggattatttggatacgttaaataaatgagttttgttttatctattatttgtgaatcaactgtggaccaatctggcaaataatgtggcggttctaaattaagtggcactggctttccatcagctaaaagtactcctgccaattaatctgtataacctggatccggtagtaacacgtaatctcctggattgataacacatgtcggtactgccactaatccattttttgtaccatataaaatacatacttcatcttctttatctaacgtcacatcatattgtctttgataaaaatctacaatggcttgcttgaacatctctttaccatgaaaagcaccatatttttgattttcaggaatagttagtgctttttgaaaatgatcaataataccttgtggcgtgggcccatcagggatcccaactgccatattaattaatggcaatggtccatgttcgattttacgtcccatcgttttcccgaaataactatcagggatatttgctaatttgttagaaatcatcaaattcctcctctatcattaaacatagcctgggcgactatcataatcctaacaacttgtatcactctcatttagatggttacaatgacatcgtcattcaccgttatgttcaacagaatttatgtcacacgttgtattgaatgaatttattttcattttaggtaggtacaatattattgtcaatattaggaattttcagattaatacacactcaatcgttatgatttaacagccatgcatatccgcatgcgcaaccagttagatatgcttatataaagtataacgcccatcaaggcacgtattcaaacgtgaaccttaacaggcgtcattcattgttaaataaaacttcttaagcacatacttatttcacaatgtcttttacgttccccttatacttttctcacatctttctcttagactactcccttacacgccttgctcaatatctttaattatttcgtctacagttattttcgcactcgttaagacaataggaacgcctgcacctggatgcgtacttgcacctgcaaaatataaatctttataatctcgcgatacattttgtggacgataataattactttgcgataaagttggcattaaaccgaatgccgaaccaaatttcgcatgatacgtttgctcaaaatcattcggcgtaaagatggtttccgatataatatgcgattttatatcttcaaatgcttcaattgttgctagtttacgataaataacatcttttatttgttgtgtcaaagcttcatctgaccaatcgattccgctacctgttttaagttccggagtcggcattaacacataaataccagttttgccttctggcgcaagtgatttatcagcgaccgctggaacatacacataaatagaaggatcatatgataaacgtccctcaaatatttcttcaatattgcctctaaaatcatctgaaaaaataacattatgaagtctcacttgatctgtcacatcaatatctataccgatatacattaaaaatgctgaacaagagtaatctaagtctgcaattttatgtggtggatactttttaataggtgcaaaatctggcattaatgattccgcaacactagggaaatcagccgtacataaaattttatcaaattttcttatgtcacgattcacttttatcgcatcggcccttttgaatttaggatcaataataatttgctcaatttcagcattaagttcaatattagcgcctaagtctttatttaattgtgctagcccttgagccatgccatacataccgcctttaataaaatgcacaccaaacatcatttcaatcataggaataattgaatatagtgacgggcctcgttttggatcaattcctatgtataacgtttgaaaggctaacagtttttgtattttttcattatcaatgtactgctcaattaattgatctgcatgatttagagtttttaatttagcaccttgcacaagtgacgtcatattataaaagtcacttggtttgcgatacgttctttctaagaaatagcgacgtgcaatttcatattttttataaacatctgttaaaaaggacataaaaccatgtgttgaacccggttctatactttctagcatgtgctgtaattcagctaaatctgtaggcaccgttatacaatcatcgcggtcaaaatacacgtcgtaaatataacgtaattgtctcaattcaatataatcttcataatttttaccacacattgtaaatacatctttataaacatctggcatcatgacaattgtgggacccatatcaaatgtaaagccgtctttctttaattgattcatacgcccgcctacatttgtatttttttcaaatatcgtcacttcatgaccttgagaagcaatacgggctgccgctgctaatcctgtgacacctgcaccaattactgcaatcttcattattcaaccacctatattatatgatatttactatttatttcatgaaacaactttgcttttttcctcttatccacaaaaatacgttcatgtaatgtatagttagcctgtctcacttcgtccagtatttcaatatatatacgtgctgctaattctatgattggttgtgcttcaatactaaatactttgatttgatccataacatctcgaaaatctttttctgcgatagctgcataatattcccataagtcaatataatgattattaacaccattttggtacacttcagcaatatcaacttcatattgctttaatcgttgcttactaaaatatatccgttcattttcaaaatcttcaccgacatctcttaatatattaatcaattgcaacgattcaccaagccttcttgcgacatcgtatgtctgatgtgtttcatgatcacttaaaatcggcgtcaatacttcacctactgtaccagcaacaccataacaatatccgaataattcagcgtccgtttcaaacattgtaaaatgttgatctttatatacagtatcaatgagattatagaaagattgaaaggcgatatttttatgttgtgcaacatgctgaagcgccatcatgattctacgattactttgaaagtgatgatgttcatatgggtatttttcaatagattgtatatcttcttttatttgatttaaaaattgaatatcgccataaacatctatactgtcatcaattttacgacacacagcataaattgcccaaaccgcttttctttgatcttctggtaacaagtcaaaagcgtaagaaaagctttttgaatgtttcttcatgattttatgacaatatttaaaattcatatccatcattgccatactagtcctcctatattgaaatgccattaccttgatttattgttctttagatatagaatattgacgacctttccattcaactacaccataacaatgcgtttgtctccaagattggatgaaaattttagtaaaaaacataaataacaatggatgacataccattaataaattagaaaattggccgacccttcgatgcagataaataaattgtgtagtatagctcaagtaaactgttaacatttttcctacagacatttggcgatattttaaactaagacatagccctacaatactcgcaatagaaccgaacaaccacaacactattgctgccatgatcttaggctttgtgccacctgccccagttgacaaatgctttgtccatccttcttgtaatgactgaaatccttcttgatacatgcgaaatgcaacaaacggaaatccttcataaactgttacgggcaatgattgtgaagtatatgcacttcctaaagcaaatccttcaataatatgacggttcgcacttttatgacctccagttgcataataatcttctttatttgttaatatcaccggtccaaatgcatgttggttagtctgaccgtcgtctaaggtagaaaatacattcataccaatgactgtcattaaattaaatatcgctgaaaacccttcgtagaaacgctttgttatatgataaggctgtacgcttaacaatcctttttcaccttgtaattgatactgattaatcaacgtttcaacagcatctttccttaagaaagttacatcagcatctacaaaagcaatacgattcgtgcatgcatgcgtcacaccttgataacaagcatgtgatttcccataccatttaccttcagtatcatcaacaacatctactacagtcgcaccatatgaacgcgctacacgtgctgtttcatctatcgatccgtcattcataacaatgacatctactggaacttgctgttgtattatcgaatgtagtaaatgacctattcttttttcttcgtttctagccggaataataattgttaatgctttatgattgaagttcagcgttttcgcctttagctgatgcctacgattaaatatcaatgcaccacacgccatagacatagtcactattactgttaatattcgtgataaccatttcatagatatcacttcctattcttcgcttctcgcgcgtttattttgtctgcgacttgttgcccacttaatgtaaccattggcatgccaccaccaggatttactgatccacctacaaagtacaagttttcaaaatactgactttctttaggaaatttaaaccctttgtttttctttttatctgctacaacaccatatattgcaccacgattagaacgataatttttttcaatatcctccggtgtccaaacatcttcataaataatgtgttttcttaaatcagtaagtcccatttcttctaatttatccaaaattttatccctaaacttcgcataatcttcagctgtaaaaggctgatcttgaatatatggaatatgtggtaagactttgatgttttcataacctactggtgcttgtgtgtgatcagttttattcgtatttactagataaatggtcggatcatctggcaatactttttcatgaaaaacttgttgataattgagataagcattttccgtaaaaaagaaattatgatgtgctaattgcgggtattggcaagcaacacctaaatgcatcacatatcctgagcttgctggctcaaattcccgctctaatttgtttaatcgttgagtatcaaggtgaagtaaatatttataagtaggtatgacttccatatttgaaataatataatctgcctttacaaactcacctgtatctaatctgatacccgtcacacgtctttgatatgttttaatattgtccacacgtgtacctgtatgaattgtgacaccttcttcacgcgctaacttttccaaggcattggctaaatgatggattccaccttctacataccaaaggccttgctcttgttgcatatggaataacatagataatacagctggcgcatcgtatgatgaagaaccaacatatttgataaaatagcctaacatttgtcgcaagtatggattcgagatacgcttgtctatggcctgttgcatagtatgtacataatcataattaataagtgcatttaatggcccatgaaatttaataatttgagaaagtgtatctaagccatgcttaaaatatccttcttcagttatacgatcgatttgttttgtgtaattcaaataattttgcagttcctctatatccttgttcgacaatatcgcattatgctgacctgtttctttaataccttcatacaaatcgatagtcgttccatctggaaaaaagctacgccattgatgtggcaatctcttgattttaacgtagtctgacatttgcttcttgctatattcgaataatttttcaaaaatataaggcatcgttaaaatagatggacctaaatcaaagccaaagccatctgattcatgacgattcactttgcctcctatatgattattttgttcatataatgagaccgaatagccactttgtgccattcgaattgctgcagaaatcccacctaagccaccaccaataacgatgatatgtttagtcatgacgttcacctcttcgttttaatatgcgtagtaactgcgttaatctcggtcgattataacgttgcacaataatgattggaacattagctatcattgcatagaaaatatttatatactttactaaacgagggcctttattgaatatgatgactggaagtatcgatatccaatgaattaactctgccctctttgtctctataatcattttttcaatttcatcagtattgattgtcattaaatgacgctgatcatatatattttgattaagctgatgaccatctaaaatcttatgtttccattttcttacgtaaaaccatttgttccaaaattttccatgcttctcaaagttaaatgatttaaatattatatgcttctgacgaaaatacttgtcaggaattcttgtacctaaatttgctatatttagttgaacaattaaccaatacatactgcagaaaaatgctgttttgatatatttttttatgattttcatttaaattgaatcactctcaatcatacctatatagtataaattgccattttattacttagttccctaaagattagtgaataaaccgctctcatttatatttatataaaacaaaaacgccaatactctcatgttagagactattgacgtcatttgatttacatttgattaatgaatgaaattatatgaacctgcttggtttgctgaaatagttcgtgatgttacgacacctgcaccgtgaccatagttcatttcagaaacacgtactgaaccattgctattcacgctctcaacataagctacatgtccatagtaaccttgtgttgtttgcatgattgcaccagctttaggggtattgttcacagtataacctgatgcagcagctgcactagcccaattgttggcattgccccatgttgaaccaatttttccaccaacacgatcaaatacataataagtacattgtcctgaagtatataagttacttcctgatgcataaccattagaaattgaacgaccatttgaagatggcgctgcagttgtagtcacacgaacattattgcttgttgtgctataacttgcacctgatccaccagtgtaatagttatttgttgctgtttggctattgtttgtatagttattgtaagatgcattgttataactataagtattgtagttgttgtagtagtatgtgttgttttgcgttaattgacttggattccaatttcctgtccaagtgtaatgataattaccttgtgcatcaattgtatacgtatagctgtatgattgagcgtcattagaattatatccattgttattttgttctgcggcttgtgcatcatgtcctgcaaatgcgatagtggcaagtcctgctgtagcgattgtagctgtaacgatttttttcataattaaatatcctcccaataatcaaaacactctatacatatagtcattagcgactcaattattttaaattttatattttttatttttttagtatgcaaataattataacttttatagttttgcgataaaacaaactataacagagattaggtaccttgtggactttgttatcataatgtaatctgttcctaacaaagcatcattgaatgtaatataccaattagaatgtttacaacactttttctgcaccgctaacatgggatttgaaaataaaaaaagcactaaacttttaatgaaatacatcctttttgataataaatatcagaagtaatgtaatatttcaaaagtttagtgcatcaagttatctcttatttgtagcatgtgtttccatcgtttttacaatcaaatcagtcagtgctttactacctgcatattctaagtgaataccgtcatatgcaaagtactccggatgaccttcagaagctttataccaatcgactagatgtacattagagcgcttttcagctgcctcataaattaatttatttattctaccttcataatctctaggtactctaatagaaactaaataaatgtctgcttttccgaaactatccaatagttcatttaattgatctttcgtaaatgcgccatttgtaccaagctctactacaactttttgaccttttttagcatagtctttatattgcgatttcacaattggtgtagcatcaacgagttgccgtccaactttaccatcaatttgtgcatttggtattttcttagtaaagacattaccaatatccaccataaccgagtcaccaattaatagtggtgatgactttttaatatcctctttactatttgctgtctgcttatcctcttgcttatcttttttaacgacttttttcttcgttgttttaaattccgtcttcttctctttcttctcggcttcatgttgtttgccaagtgcatcaaactgtccactgagcacaacgatagacggaaccaataataggataactaacacagttctagcaaattgccccttctttttaggtaaaaatgcaaaagctttaaacccttttttacgtataggtgtttcaataaagcgatacgaaatttcagccattaacgctgttaacaaaatttctatcacatagacgtatacgggtatttgtccttgtacgtaataactgttcacaaaaacaatgataggataatgccataaatataaactatatgatcgtttacctataattagcaagggtttcatacttaaaaatttagcaaataaactagaaggatgtaccgcaatcgcaataatgaataaagttgcaaatgatataatgtaaaatcctccattataaatccattgatcttggtctccaactataaagaacaaagtcattagcaccgcaaaaccagatatccctataatatctaatgatacgacaatctttttagaaatatcttttttcaaagcaaacggtggccaaataaatgctaatatacaaccaagcaataaagtttgcagtcgtgtatctgtcccaaaatacacacgtgaattatctccagtgatgaaatgaatcactatcataagtcctaaagaaatcaacgatacaataaatagcgtttgaataatatttctcggtttaaatctatgtaataagaacgtgataaccaatgggaaaagcaagtaaaattgttcttcaatggctaaagaccataaatgtttgagtggttcaatagcaaattggttaaaataatctacattctgtgaaatgtaccaccagtttgaaacatagaatatagctgcaatagcatctcgtttcatttgtataatcaattccggtttaaatatcagtgtgaacgtaagcacgacacagattaaaaataacactgccggaatgagtcgtttcaatcgtcgcttccaaaactctagtaaatcgattttttgcgtccgataatactcacttatcaacaaacttgttattaaataacctgaaataacgaagaatgtatctactcctaaaaagcccccacttaaccattgtgcattcaagtgataaataatgattcctataactgcgaatgccctcaatccatctaatccgggtaagtatcgcggggaatacattttttctaaacgtttaaagtcttttgtatccatgttaataaacgccccatttatttttctctattttgtagcatatcacaatatttttgaaaataaaatattgcactgattttcattaattgatttaacccttaattaagatagttttaaattttttattaagtagaaaacaattattacagttaatttcattactgcaaaccacatataaatttgtcgattttactacataacatagattatcatagattcttgaatttttaacaaaataactgttattttcattatatttttacaaaaaaggttcgttttatattttatgcatcttacttttacagaatcattaagatttgctattcggaatttactttttcaaagttgaaaaaactaacatgtattgaaaataaagtgaaatgcagcctatcctctaatttaaaccaaacgatatatcacgtcagcctttatatttaaacgctatgtgtcacttttaaaatgaatattactaagattgtcatatcaattattcattgcatcgaattaatcttttaaatttctataataaaacctattatctacatctaatttaggaaaactacttggtaaatctcctcgcttaatttctcggaagccattattagaataaaaatactgtgcactaataaatttatcaattgttcctaaataaataccatcgatattttgttctttacatgtcattataactttatctaaaagttttttacctatttttaaattcctataaccttcatcaacaaacatttttttaagtgcagacatattattatctagtctaatcaaacctatagtaccaacaatattttgatgattgtttattgcaagccaaaattgacctccgctattcaaataattatgttcgatgttttccaaatcaggttgatcattcctatcaatatttatattaaattcatttttttgaatcgataaaataaattcgattaactcttccttataagatctattatattcaattatgtttatagccatttttatctcctttttcatttaatttaatcataaaatgcgcgtttagtttgtatctagtgtactcagtacagcctcaaatgaagtttcattccacttggcacttaataaagacaagtattttagcagtaatacaataaagtccaataaatttccctaacttcaatatccactttttaagaaatgtatttttaattaataaaaaaactctccccaatttctatgggaagagctatatatttaatgtctaaacattacttttattaattatgaaggaattagaatccccaagcgcttaaaccttgtgctttgtatgctttaacagctgcgttgatttgttggtcaacagtgtttgttggaccccaacctggcatagtttggaataaacctgaagcacctgatgggttgtaagcatttacttgaccatttgattcacgagcgatgattgcagcccatgtagcagctgaaacaccagtacgttgagccatgatttgagctgctgatgaaccagtagcacctgcagtattaccattgcttaatctcactgaacttgaagtagttgaagtgctgtagttatggtaagttggagctgaaacagcttcaacgtttgagttacttgattgtgcattgtagcttactgattgtacatttgaaccttggttgtatgaagtagtgtagtctgcacctgcaacgtttgagaaaccagcagtttgaccattagctgcttcatagctccatgaccatgtagtaccatttgaagtaaagttatattggaaaccatcttttacaaagtggatgtcatatgcaccatctttgattggagctgcatttaattgatcttggtgattatgcgctaagtcaactaagtgtgcttgatcaacgtttacttcagcagcgtgtgcttgatgtcctgtacctgctgcgtaacctgttacacctaatgccactgctaatgatgatgccataattgtctttttcatagtaaaaaatcctccagtaataattgtaagtttatgtttttagtaattatattttgaatttgaatgtcgtagtgcaagtttaaattgtcttttatttctttcaacggtactcactatatcataaaaaagtagcaagtaaattacactttctttacaaaacattacaatatcaagtgttatttgtaatgttgaaatatggttgttttatactgtaatgtgaaatatgtttcttttagaatctaatcaatccttgaaataagcataaatgcataagttttttactatatttagctcaactattacagctttcgtaatattacagattgtatttttgttacacgcctgtaacattaccgtcatcaaatacaacttactttgatcaattaaacgcaattaaaaagcaatcaacacatagatttctacaaatgtattgattgctattattattacatattcaaagttttagaatacacatcttttattaaattaaagtcttcctttttcaaaagacatatttgattttaaacacgtgagtaaatttcttctataatgaaagtttctatttcaattgttttgctaatccaaacttatgatttaaagattactccatttcaatagatagatcggaaattaacccataaatttgaaaatatcatttgtataaagacgaaatacttttctataaacgatatccgcaacccacgctgtaaggaatggtactacaaagaatgcaactacaataagcaatacacttaaccatgctgaatcaacatgcatgaatttaaacgcattgattggcccaaccatacctataaaaccaaaaccagcagattctttcgttccataaataccaactattgctgataccaaccctgaaacaattgcagtcgttaatattggcaacattaaaattgggtatttgacaatattcggtatcatcattttgaccccaccgaagaatacagatagtggtacacctaatctatttactttactagttccaataataagaacggcttcagttgctgaaattccgattgatgcagatccagcagctagtccagtaatacctattgcaaaagcaattgctaccgtagataacggtgaaataataataagactaaataccattgaaattaaaatactcattataattggttgtaattctgtgaatccatttaccatatttccaatgcctgttgtaatcattctagtatatggcaatattagaacacctatagctcctgaaatacctccaactactgtcggaaaaacaatcaacgccatactaccgacacgatgttgaattaacaaaataaataatacggctatagctgctgtgatcattgtatttatcaggtcacctataccagcaataacccaagcaccatttttaaattgtgctgccccgcttcctacatatgcagcactagatactactgcaattgctaatggcgataggtcaaatttcatggcaattaatgcaccaatcaaagctggtactgtaaattgaattgctactacaacacccagtaatgttttaaaaattggatgataatccataaaatacttaaaaatttctccaagtatagcattgggaactaaacccgcaacaatacctatagcgacacccgataaaactctaaatataaaatcttttggtgtaattgttttaattgatgtcataatatcatccttccacttatgtatacgcatatttatgcaaaaataataaagagccttaagttataagctaccactagcttaaattctaagatgtgcatgccgatgttgttatatttaggctagcgatatcatctataactcaagactatgaaaaatagtatatcacaaaattctgaatttttagataaagaaattggcaatttttcaaacatattgttacaatacacttttattttatcttcatttttaaaatacattcatataatagaagaaaggcattcaaatgcttaccaaaaaggtacattatttgttaggagcgtatcagcacttacatatcatcaacacaattgacaatataatagaagatactgataataagtgttaaaacaacagatgttaggtagtgaacaaatgattgaaagtaaatccatagatccaagaatcgttagaaccaaacaattgcttgtcgatgcttttcttaaaatttctagagaaaagaaattatctcaaattacagttaaagatatcactgatattgctacgctaaatcgtgcaacattttacgctcatttcactgataaagaagacctcctagactacacattgtctgtaaccattttaaaagacttgaatgataacttgagcatttctaatgtcattaatgaaaaggtactgcgtaatattttcatttcaattgcgagttatatcaaagatgctgcaaagtcttgcgaattaaatagtgaagcattttgcaacaaagcacatcaacgtattaataatgaattagaagatatttttgcgattatgttagaaaacagctatccggagcatcaacgagatatcattgtaaatagtgcgagttttttagcagctggtatctcaggcttagcattacattggtttaacacgagtcaagaaacagccgatgtgtttatcgatcgcaaccttccatttttaattcatcatatagcacatttttaataaaacttggtatttagtcatgcatcttgaaatcactatgtgacttaggttcatacttgtacacacaataaaatttaacgtattacgattgattagccgtgtctaggacataaattaacgtcctatactctacaaagccatattggcagtcgttaactgaataaaaataagcttgtcattaaaacatatagattttagtgacaagcatttttgtttttgcgtacttaaacaacacttcaggcaatatgttgtttaggcaacaaatgatatgtacgtgtttattggcaaacgtacgacatagtagtatagtatgtctaaacaacacatgtcgcatagttgatatgcgttgtttaaatactaagataggagggattgacgtgagcgagacagatgaacctcaggggtttgaacacacgcataacatattaaatattaatcagaatagtcagagtctaatgacattcattataagtaaattgaagtcgaagttgaagcatcacataataattgctcgtggtaataagcgaatcgactatcgactgtcgtataacttttacactacgtattatgataatgtagaaatcaagaaaatcgactgtgaatatacctatgcgatggccattgcaattttaataagacacacgatgtcattcgacaatgctcatttctttgctcagctacgtcatcctgtcttataaaacaacattgcagacatgtatatcaaacggcacttcaataacatcactttgccgtcgtactactattaaaatcgtgtctcaaaccccttattttaattccaaaaatctgctggtcaaaagaccgagaaactaaaaacattactgaatgtgttgataaattaccttatagaaataaactcaaaatatatcaacacttgattctaaggaggatatgacaatatgaaaattttagatagaattaatgaacttgcaaataaagaaaaagtacaaccacttactgtagctgaaaaacaagaacaacatgctttgagacaggactatttgagcatgattagaggtcaagtgttaacaacattctctacaatgaaagtcgttgatccaatcggtcaggatgtcacaccagataaagtttatgatcttcgccaacaatacggttatattcaaaattaatatttgctcacgaggtattgcacttaaggtgccaactgacctcataaacaaagcccatacggattgaagacactaatgtgtcgcaccatgtctcttacgacatgcgcacattacgcttcatctctgtatgggctttttatttattcttttgagaattttattttagcagactaaaaaattaaaatggtgtccatcaagatctttgaacattgcaccataaaacccttggcttactgttggttcttgaacgactgtgccacccgcttctttcactttattcaccaactggtcaacttcttcatttgtgttcacacctagagaaatcatcacttcatttggttcagtgttaaggctttgctgactcacattttgaaaatgcttgttttctattaaaattacggttgtttgacctatttgaatgcctaccattttatctaacatttgtgggtttctatttattttaaatcctaacgctttataaaactgtgcgctcttttctaaatcttgcacatgcaaattaaaccacattgattgaatcatgattgcaccccattcattacttattatagtcttggactttaagccaatcacttaatgataatcttgttggatttatttcagccattaattcaaagtctacttcataacctttttcttccaaccattgcttttctgcaacaccactaacaaattctccttctataacagttgatttacctgtcacttcactaaaaattgttgctgcttcacttaatgtaacttcatcggaaccaatctctattgattgatgcgtaaagctttgtggatgtgcaaaaatatacgatgcaattttagctatatcaatagaagaaatcattgtgaattttatattcggattaataaattctggtaatgtaatacgttcatcttcgactttagcaatacgtaaaaaattatccataaagaatgatggtttgataattgttgcatttatattagattctattaatctattttctatttttgctagtacttcaaagtgtgggccagttcgatttcaattaacccctcccgcagtactatacacaatatgttgaatattttcttgctcagctatttcaattatcttcataccttgtcttaattcttcgctaacatcatctttaacgattggctgaatactgtataagccatacttccctttcatcgctgattgcaaactaacactatcactcagatcaccttcaacgattgataaatgcggatgtcctatgtctgaaagtttacgattattcttatttcttgttaatgcacttacataccatccatcctctaacaactgttttacaactgcattaccttgcttccctgttgcgcctattactaaaatatctttcattttagatccactccccttttatcttaaaaaccaatagtcctctttttcaccttttaaatacgtatatggttctggtgtttgtccattttccttaatattgtcatttattacatttctgacatcccatactaaatgaataaatcgttgtaattgatgactaaaaatgcctagtggcgctttcatagctaatgctttttccacatcttctgtagtaacattcagtttttctgcaatcatttgaaccgataaagttgatgcttcgaaatgtgcttgcaattcttcagctgtaatacgtctttgctctttatttaaagacatacgcaacactcttttcttttatgatgtttaatagttattgcaaattcattgctaactttcttaacacgttttataataaacggagagttatccgtttgtcaattttagagaactataagtaggtggaatcatgcgaaaagatgcaaaagagaataggcaacgaattgaagaaatagcgcacaaactttttgatgaagaaggcgttgaaaacattagtatgaaccgtattgctaaagaactaggtatcggtatggggacactatatcgacattttaaagataaaagcgatttatgctactacgtcatacaaagagaccttgatatttttatcactcattttaagcaaattaaagatgactatcattctaattatgaggttatgcaagtgtcgttagattatcttttacaatttaaaatcgataataaggcactactgcaatgtattgaagcaggcaacaataaattacgtttttaccaaagcgcattttatcaagaattatttgatttttattatgacttgtttaaaagcgatgacgacatttacacgaagtttaaaacagatatgctgttgcaagcattatcaacacgtgtatttgatttccaaatagaacatcgccatatttcaattgaagcgtatagaaattatttattaaacatttatttagatgaggtggaacgtaatgactaaaattgtgttaattacaggtggtaataaaggattaggctatgcaagtgcggaggcacttaaagcattgggctacaaagtgtatataggttctcgtaatgacgtaagaggacaacaagcatctcaaaaattaggtgttcattatgtacagttagatgttacaagtgactactctgtcaaaaatgcttataacatgattgctgaaaaagaaggtcgtcttgatatcctcattaacaatgcaggtatatctggtcaattttcagcaccttccaaattgacacctcgtgacgttgaagaagtatatcaaacgaatgtatttggtatcgttcgaatgatgaacacattcgtccctctcttagaaaaatctgaacaacctgttgtcgtcaacgtatcaagtggtttaggttcatttggaatggttacaaaccccgaaacagctgaatataaagtgaattcattagcttattgttcgtctaaatcggcagtaacaatgctaacattacaatacgctaaaggattaccaaacatgcaaatcaatgctgctgatccaggtgctacaaacactgatttagttggtgattttagtaataattcaaaacatgtttctgaagggatcaagccaatcattcaattagcaaccattgatgcagatggcccgacaggtacatttattaatgggaatggtgaaatgccttggtaatccaaatttatgttacaaatattgaatttagaggtaaataaaaaatgcttctgcaatagatgcaatatacatgcaaaacaatatggaggcgaatcaaatgaaaagtattacgtttgaagaacattatgtcattgaagatattcaaaaagaaacgatgaatgcgatatcggcagatcctaaaggtgtgccgatgaaagtaatgttagaaggccttgaaaaaaagacaggttttacaaatgcagatgaattatcacatcatgatgaacgtatccaatttatgaataatcaagacgttcaaattcaagtcttatcttatggaaatgggtctccttcaaatttagttggtcagaaagccattgaattatgtcaaaaagccaacgatcaattggcaaactatatttcacaatatcccaatcgttttgtaggctttgcaactttacctatcaatgagcctgaagccgcagcgcgagaattcgaacgttgcatcaatgatttaggattcaaaggtgcgctcattatgggacgtgcacaagatggttttcttgatcaagacaaatatgacattattttcaaaaaagctgaaaatttagacgtaccgatttatctacatcccgcgccagttaacagtgacatttatcaatcatactataaaggaaattatcctgaagtaactgcggcaacatttgcttgttttggttatggttggcacattgatgtcggtattcatgcaatacatctagtattatctggcatttttgatcgttatccaaagttaaatatgattattggacattggggtgagtttatccccttcttcttagaacgtatggatgaagctttattcgctgaacatttgaaccaccctgtaagctattactttaaaaataatttttatatcacaccgagtggcatgttaacgaagccacagtttgatttagtcaagaaagaagtaggcattgatagaattctttatgctgctgattatccatatattgagcctgaaaaattaggtgtatttttagatgaactgggtttaacagatgaagaaaaggagaaaataagttatacaaatggtgttaaattattaggtttatcatctaacaattaacaaatggaggtcattgaatatggaaactttagaattacaaggcgctaaattacgctaccaccaagtcggacaaggacccgtgctcatctttattcctggtgcaaacggtaccggagacatttttctacctcttgcagaacagttaaaagaccattttactgttgtagccgttgatcgtcgtgattatggagaaagcgagttaactgaaccactccctgattccgcttctaaccctgacagtgattatcgtgtcaaacgcgacgcacaggacattgccgaacttgcaaagtcattaagtgatgaacctgtctatatattaggttcaagttcaggttcaatcgttgcgatgcatgtgttaaaagattaccctgaagtcgttaaaaagattgcatttcatgaaccaccaattaatacatttttaccagacagtacttattggaaagataaaaatgatgacattgtgcatcaaattttaacagaaggcttagaaaaaggcatgaaaacatttggtgaaacattaaatatcgcaccaattgatgcaaaaatgatgtctcaacctgctgatactgaagaaggacgtatagaacagtacaaacgtacgatgttctggtcagaatttgaaattagacaatatacgcattcagatattactttggatgatttcataaaatacagcgataaaatcaccctactaaatgggacagattctagaggctccttcccacaagatgttaacttttatataaataaagaaactggcatacctattgtagatattccaggcggtcacttaggttatattcaaaaacctgaaggctttgctgacgtattattaaatatgtggggttaatctatcgttctctaataaaacagcttgggcagttttcaaaatatttttgatgactgcctaagcttatttttgtttacgtttaaacattcaaatcgactcgttattatacatgaaggcatgttaaccattcttttccactgaaaacactactgttccaaacattgatagtcttcttttgaaataccctttccgataagcaccaaatattctggcactttttttgaaaatgctacaggtgttaattcatattgtccttgtgtaaattgaatgagatatgtatgtgtggtgtcttggaatgtcataaatcctttcaacctataaatatgagacggaaggcatgctaaacgttctataaattcagcttttgtacatttgactggtgattgtacaaattgatgattaatcatttgatgtaacgacttatgtttattgtcagaagttactgtcatttggccaactgatattggcaaagtgactctgccatgcataccaacttgtatatcagcatctggattaattacttctaaatcttttaaaagtttgctcgtcgtatcaacatctgctgaatctattttattaacaaataagacagaacaatatgctaattgctcataaaataagccttggatgtctttagggaatgatttaatgtgtttatacatgcttgcgtctattacaccaatcatatgtgtaattgttgtaaacggagctaaaataggtgttaaacaagcatctaagacagagaccggttctgcaatcccactacattcaataaatacaatgtctggttgctcttttaaatataattgatgtaactgttctgatacatctgctttcattgcacaacagatacacccctctgtcagttcacttaaaggtatgtcttcagatactaaggcaccatcaacactcattttgccaaattcattcataataactgccggtttcagcgactcctttaatgattcagcgagcaaatgatttaagacagtcgttttaccgccacctaaaaacccacctataataactattttcatctgcgactctcctcttatacttcatatgcatagaatattccaagatagctttcctattgactgacatgactctatattcagttatagttcatttcttttttaaataatcaacattaccattttaacaatgatgcctacaccaataactaaagacaatgatgtcaccatttgctttccaattaattttagtgctgactgaccacctaaatgtttcaaaagcatcgtcattgtgaccgagcacgctgtaaaagttgaactaaaaaacacaagtagtagtaactgtattgctgtcattccttgtaataaggcgccctgatgcaaattaaacaagagcatgccgtcttttcgaatcattgaaaataaaatccctggtgacaattctgacgagatgcctaataacgataatataggtgtaaatatttgtgataaaacattcaaaattggcgttagtgataaaatactaacaataagacagattgtgataaaaataggtagcgcttgaacgataaacatttgtatattttgccacatttgtagcaacatttgacgtatatttggcatatgtaattgcctatcataaggtagcggaacgctaagttgttgatcattctttttcaaccatatcctattatgcaagatgccacctaatagtactaatattaagtacggcataaacagccatgactttccagctacactaaaaatagataatgtcgcgcctatttgataactgcaagaactaccaaaacttattaagctcatgcactgtgtcttcgtgcaggtatgacattggtgtgctgcttgtgaaatggctgctgcattacatccaaatccttctaatagtggcacgatatcattgccttgtaatcctatccgtaacattgaaggttcaattgcccatatcatccatgatttgagtcctgtttgatcaattacagcagttgataaactaatcaatattacaaccggcaatgcccatacgagcgaatatgttccaagtgatagcacaccataatcaccaaataatatatgctgtaatatatcgtgattgagcaatgttgtttgagttaaatattctatccatgctgatacatactgattttgaaaccaatctgaaaattgataagcgataccgattggcaatgcaaacattaaaaatatcaacaaccaggctaaaaatgtcgcacttattttaggtcttaaatgtcgtcgttcatgttgaaatagtgtcaattgttctatcacatgttcgctcgctataggcgaagaaactacactttctgccaatgaaatatctaatttctgttttatgattaataatcttaatttcgctttttctgttgcggtaagtttatccgcatgactaataaccaaataatgaggttcattaggtatgggcgtataatgcccggttctcatatcatatttcacttctaacatgtgcatgacacttcacaacatgaataatcatctaaatacatttgatttttttggtaattttcaatgacctcttgtttagctggtaagccttcccgctgtgttaaaagatgtgcaagtactgcaaatcgcgctctgaatttatagatatagcataatttggcattatcattttcaactgttgcaccaatcataaaaatattcggataacgtgtcgattcatcatgtgttgttaatttaatatcttgatttgttgtcgcaaataattgttgaacgattggattttttgttgcatcaaagccagttgctagtattggttcatgaggcgtatgcacactttgtccgctatcaaaactgatatgatactgtccatcgttaaaatcaatatctttaactgtataatgcacattcatttcaatgcgagctccttgcttaatgacattacctagtcgctgacgtgtataaggtgacaatctaacactaggatcagcatccggatcatttaaaccggttgtgctagtataaagtgcgatatcagagccattttttgcaagttgatatgcagcatcaaagccactttcattacctccgataaccacatattgccccttattaaagttatcaaagtcttcaatttcactataatgaataccatatttaaatggctttttagggaaattataatcacctgttgcgacaaagatataatccgcgtgatatgtctctgttgtcgttgcaatcgtataatatgcatcatctacagatatatttgtgacaactgtgttttcaaagatattcagctcgtaatggttggcaaccacttgtaaatattcagcatatgtttctccggaaatatgttcttcattaaatgtaaatgctggtgaagtatccatggaaattgcattcatatcaggcatgccaaatccattagacgtaaatgatggcgtaatcgtacgggtcgatttcggccaatgtttaaatgaatgtcctactgttcctttttctaaaataatgacatcttttataccgaaatcttttaaggtaatggccatacctatacctgcagcaccggcaccgataatagccactttatgatgttgcatattaacactccctcaatgatctatttcaagttattgtttttgattataaatcgtaataattacgatttataaagtatagacctatccttgagaaatttcaatattaaaagaaaaacttccgctattgtagagaattcatctacatttcggaagttggtatgtgtcttttttattaaatttaaagatgctacggttagttcaaatgattgcgatagacattcaatggttgtcatccagcctcagtacttggagataacattttggcgatgagacagaaatcatatttttacaaaatttatttcgtcgtccccccaataaatataaagtatttctttattgttgtgtaacttctccacgttgtatttcactatccaaattttgtttcatattatcaaacaactcttgaaatctaacctcatcttgatcagaataacctttaaaaataactgaatctatattttcttcgttaaaataataaatttcatcttccacagcaccaatcggatatttacatgcagaatagtcaaacatatacttttgattttcaatttctacaattggtcctcttttaataatcattaacttttgcgaaccttcttttaaataaataatgcttcctattgtttccatttattttcctcctttgtcaccatctcgatttcgatattccttcgcatttccaagtcaatcatctcttcttccgctttacgaatgccatgttgaatttgctgttgctgctcgtataacgcttccgttgaacgtcgtttcgcaaaatgaaattcatcgcgtaactgttccatgcgactagccatattgctactataataacgctcacttaaatgttgatataattgttctatcgaatgattaagcgcatcactttcatctatcaatgctttaacctcttgcttttcatcatataagtcatccatttgcttatgtttcgctgtgattattttattgatttcatcaagtttattagacatcatttcaccacgttttaatttttgccaatttcattaccaatcattacgtctgtttgattaaattcttcgccaactttttgtatactatcgctcgcagttcgtattgcttcagcaacagattgattcttactaatcaaatcatctatcacactatgagcattattatttccacttactgttgtactttcatctttatccggtttcgaaacattattacatgtttcaacagcgcttttaatagatgatgatgcactattggtcttaaaaatatcactttgaactgtactcatcatttacacctcttcccatttaaattattttaaaattattagaaactgtatcaatatatgatattcaaacattcaattatacttaaatattgttttatgattatattcaaaattattgtatcaataaatatgtatcattcctataattttattgaacaaaaagttataaaatcacttttattgcaaatcaaccttgttttgcattacagaaattagcgctagaaattaaaattttattttccaacaataaaaaagcacaaatattttattgaggcagctgaagaccttctcattgtaaaaatatctgtgcatattatttattatcttaatctaacgtaataactaacctgttgtatcttgtaaaatcttatccatagattgcgcaacactatcacggtacatctccccaaatttcaataaatgcaccatcaataaatataaacgataaaattcaagtctataggatgcaccttttgcgagtggataatgtttattatacgcatcataaaattcgctcgtaaaaccaccaaataccgttgtaataccgatatcaaattctctgtcaccatataatggcgctggatcaaataacgctggacgaccatcttgtaagaacatataattaccaccccataggtcaccatgtaataaagacggtttactttgatgcttttctaattccgccacaatttgacgtcgcactttgtcatatactttgatatcgttggcatcccatagccctctatttagcaactcatctttcaaatggtccatgcgcttgtcgacaaaaatggtacaccaatcgtcttgccaatgattatcaaaagaaatatcgccaccttcataaggtaatgagaagccaaatttgccttcttcttgttgctgactgtgtaattgagctacgagttgccctaattggcgttgactccctgaagccccttcttctaaatacgtcatcactaaatacgcatcaccgttaacctcgccacttgcaattactctaggtgccgtgatacctgcacgttcaaattcatttaaacctgcaatttctgcagcataaaatgattctttacgtccacgttggacaagtaagaaaaatgtatccgtatccgtttcgactcgatatgcttcgtttacatcaccaccactcactggtgaaatctttttaatatcttttaaaggtaattgctctaaccattgttcattcatacaaacaccttccattacgcttactttatactattatattgcctaattaggatgatttaatcttaaaaacgttattcaaacttgcgtcaattttcaaaactttttagttttaactaggaaattatgtagggaaatgctagtctattaaaagaatatatttcacatatattaagttgaggatagtaagcctcaaatataatgaaataggagcatactcatgtacaaattaattaaacctttcttattcaaaatcgaacccgaaaaagcacacggactaactatcgatgcattaaaaacgttacaaaaatttccggttttattcccagtcgtcgataaactatttacttataagaatccaacgttatcacaaacgatacaaggtaatacgtacgacaatccaattggcttagcagctggtttcgacaaatcttgcgaagtgccaaaagcattggaacaccttggattcggtgctttagaattaggtggtatcacacctaaacctcaaccgggtaaccctcaaccacgcatgtttagattattagaagatgatgccttgataaatcgaatgggcttcaataatattggtatgaacaaagcactcagtcatttgcgtaaaaatgcttatcaagtacctgttggtatcaatgttggtgtgaataaaatgacaccttatgaagcgcgttatcaagattatataaaggttgttgatacgtttaaacacgacgtttcatttttcacagtcaatatcagttctccaaatactgaaaatcttcaaaacttccatgataaagatgaattttcaatgttatgccaagctttaacaacatttaaaaaacagcacgatgtaacagtgccaatttacttaaaactaacgtctgatatggatttcgatggcttaaaagcactattaccagcgattactgagacatttgacggtatcatcttagcaaacacaacgcgacaacgagatggtttaacttctgctaataaagtcgaagaaggcggtttgagtggtcgtccattatttgaacgtaatttaaaattgattaagtatgcttatcagcaaacaaatggtgaatttttaattataggtacaggcggcgtattcagtactgaagatgcaatcaaaatgatgcgtcacggtgcgtcacttattcaaatttattcatcacttgttattgaaggcccaggtttaactaagaaaatgaacaaaggcatcgcacgttacttaaaagatcatcattttgacaatgtcagtgatattataggactagatgcctaatccaacgtagtcaaataacactttaaaacttgctgaatcgtcttattaaaattatgatataactcaagaagatatatttatcaccatttttcaaaataatggcttaaatatcacatatcattaaatatagcgttttataacggaggcgtttgttatgactaaagaaacagataataaaaaaacagtagcgacttctgacaacaaagacacaaagcaacaaaatcaaactgaagaagatgaacgtcaaggtttaaatggttatcgtaaaacagatcttgatttagaaatcgagcaagagctacgtgaaatgatgaaaacaggtgaaaatgaaacgaaaaacgactacaaaaagtttaaagttttttctcttatttcaacacttgtcattgttattttagcaattataagatttgttcataaaatgatgtaattagagtgagacattgttttatgtctcaggattcagttattcattatagctacaatatttacgatgatataaataacccgagattttagtatgattcatttcactaaagtctcgggtttctatttgataatttttaatagggcatggcttgtatatgcgcctgccttttatctcatttccaatgattaatctggatattgttctaaaaatgctttcgcttctttattaactgttttaaaatcaataccttgttgcatcgctgcaaagacacatccacaataacactgcctaaagatattatagtcattacacatttctatggaacgctcataacctttacttttcttaaaatcacttggcaaataattcacatcgtatattttttggacatccataccaagttcattgattaattgtgcgttctttttaggggataacgttagtgcgcttccaaaatagtcatacccatgctctacagctgctttagctacaatatccaaacgcatttcaaaacaagcagtacaacgtaagccgccttctttttcatcagctaattctttatctttcaccattttcataaacttatgcggttcataaggtgcttcaatatacttcacattcgcaccagtcttgcgattaaaatcttccacaaattgttcttgcactttagcacgtcgtaaatattcatttttcggatgaatattggaattcgcgaaataaattgcaatgtctgcatattgtgttaaaaactctaatgtatatgtactacaaggtgcacaacaactatgcaataagattttaggtctgattgcttctctttcccactgcccgattaatttcttcaacaccttgtcataattaattttttgatttttcattttactgataattggttcagcattaatcatgatttaacctcccacattgaatcattaacttctattatatatgattcatattaaatgtcagtcaaaaaagttagaaatttattttaatacatttatatttcgaaaatcccttatgtatctgaagtattttttaaacttgaattttacaacactaaacaacacatacgtctctgtgtcattttcattttttgtatgtcatatatgtttactacatgttgaaaaatttcacccttcaatttatcatgtgttttacaaaaaattgatttcaattaatcgttaaagttatacttttgtctatttttaatgtaacatgatgttagtaataaaaataatacattgaggtgttttacatgacagcattattcccttatatcgcttttgaaaattcaaaagaagcccttgcatattacgaagaagtatttggtgcaactgacgttaaacgtttagaagttggcgaagaacaagcgtcacattttggtatgactaaggaagaagcgcaagaagcaactatgcatgctgaatttgaagtgcttggcgtaaaagtgctatgttctgattcttttggtcgcgctgacaaaattaataatggcatatcattattaattgattatgatgttaacaataaggaagatgctgataaagttgaagcattctatgagcaaattaaagatcattcttcaattgaaatagaattaccgtttgctgaccaattctggggtggcaaaatgggcatctttaccgataaatacggtgttcgttggatgttacatggtcaagactatactgcaatccaacaataatgttattgataaagatatcatttaataagcttatgttatttagcaaagcaagccactcttgattcatggcttgccttattttattgtatatttttaattatcgttgctggcccttgattgacaatcgtattaaaatgccttattaagtcaactttgtctatacggtttggatcttctacccaatgtcttatcagagacaatcccgcacctgaaacataactcatgaaataggaaaatggtataccattaatttgatcattttcatttttataacgttgcaaatgacacataattaaatcataaagttttttcgtggatatttgaatctttacccatacgaaacatcaattgataaaatgcgatgtctttttctatcatttctattaaaacggtcataatttgatgtatattatccgtggataacttaactgctccatttaacttctcatcatgaatgaagtctcttatttcctccaactgctggtcctctaatttttcaagcaaatcatatttatcataataatgcgtataaaatgtactacggttaacatcagctaaatctgcaatttgttgcacagtaatctcttctaattggtgttgatgtaaaagttcaataaatgcatttctcattgcaacttgtgattttctaatacgtcgatctatagtcatttgtatcaagtcctccccaatgattataaacaattataaatgttatgttcattatcctacaaatctccaacattgatgattggcacacaatgtttacctgtttaatataggtgatacaaacaaacggaaaaaggtgataacaatgaaccaacatttactaggaaatccaaaattaactgtaactaatgtcaatgaagtgaaagccggtattaaccacatcgttgtcgacagtgttcaatatggaaatcaagaaatgattatggaaaaagatgtcactgtggaaatgcgcgatggcgaaaaattatatattaatattttcagaccaaataaagatggcaaattccctgtagttatgtctgcagatacttacggtaaagataataagcctaaaatcacaaatatgggtgccctttggccaacattaggcgccattccgacatctagttttacacctgaagaatcaccagacccaggattttgggtgccaaatgattatgttgtagttaaagttgcattacgcggtagtgacaaatcaaaaggcgtcttatctccatggtcaaaaagagaagcggaagattattacgaagtgattgaatgggcagcgaatcagtcatggagtaatggaaacatcgggacaaatggcgtttcttatcttgcggtgactcaatggtgggtcgcatcattaaatccaccacatttaaaagcaatgattccttgggaaggcttaaatgatatgtatagagaagtagcctttcacggaggtataccggatactggcttttatcgtttctggactcaaggtatttttgcgagatggacagataatccaaatatcgaagatttgattcaagcacaacaagaacaccctttgttcgatgatttttggaaacagcgtcaagtgccattatcacaaattaaaacacctctactaacatgtgcgagttggtctacacaaggtttgcacaaccgtggctcttttgaaggatttaaacaagctgcatcagaagaaaaatggctatatgtgcatggacgtaaagagtgggaaagttactacgctagagaaaatctcgaacgccaaaaatcattctttgatttttaccttaaagaagaaaataacgattggaaagatacgcctcatgtcatttatgaagttagagatcaattttataaaggcgaattcaaatcagcgtcagcgttccctttacctaacacagaatatacaccattgtatttgaatgctgaaaatcacacattgaatcatgcaaagatcagtagcgcgcatgtcgcacaatatgactctgaagataaacgacaagatgtaagttttaaatatacgtttgacaaagatactgagttagttggaaacatgaaattaaaactatgggtaagcactaaagactcagacgatatggatttatttgcaggtattaaaaagttagatcgtcgtggtaatgaagttaacttccctgattttaatcatattgaaaatggtcaagtagctactggttggttacgcgtatcacatcgtgaattagatcaagaaaaatccacaattgcgcaaccttggcataaacatgaaacagaattaaagttgtcacaagttgatattgtacctgttgaaatcgaattgttaccttcaggcacgctatttaaacaaggcgaaacattggaagttgttgtaaaaggtagtgaaattgtaattggtaatagtacccctggcatgaaaacacgttatgaacatgaagaaaccgtaaataaaggcatgcacatgatttatactggtggtaaatatgattcacaattaatcattcctatcgttaattgatatacagcaattacggtcgattttgattaaaagtgacatagtgataggactgtataacaagagaaggccacacgcttggaatcttaaaccaaggtgtggccctttttattatttatggctatttaattttataacactatcgtattttctttttcatgaatcatttcaataatgacattgtcttcattcattactgctactttaggtgcatggtgtttaatttcttcttcattcaactgtgcataagtcatgattatgactacatcgcctacttcaacaagtcttgatgctgcaccatttaaacaaattttaccactacctctttcaccagctattacgtatgtttcaaaacgtgcaccattattattattcacgatggctactttttcatttggcaagatgtctaccgcttccaatatatctgaatcaatcgtaatgctacctacataatttaaatttgactcagtcactcttgctctatgaattttagcattcatcattgttcttatcactttattcagctccaattattatattatctattaaacgcgcttttgaaaatttgacagctaacgagataaatatgcgtccagttatttcacgttgttctactaattgatgataactataaacagcaacttcttcaatgcgtccacttatatgtgattcaagatattgagtaaccctgtctataattactttactttgacgttcaccgtcttgatacaacgcttgtgctaatagcaaacttttacttaaatgtaccgcttcttgtcgttcttgctccgtcaaataaacatttcttgaacttttcgccaaaccatctgcttctcgaacgatatcaataccaataatttcaacggcatgattgaagtcttttaccatttgctcgacaatagccaattgctgggcatcttttttaccaaaataagcataatccggcataacaatattaaatagcttattaactactgttaccaccccatcaaaatgccctggacgcttcgctccttctaacacatcagctaatggacctactttgacatcaatacctaattcacctggatacatatcttctactgcaggatgaaaaacaatgtccgcccctacttctgatactaattctaaatctttatcaatttgtctcggataagcatcgaaatcttcgtttggaccaaattgtaatggattaacaaatacactcacaactgtaatatcatttgtactaactgattcgcgtaccatcgttaaatgtccatcatgtaaggcacccattgttgggataaaaccaatcgttgtgcctgagcgtttggctgctttaacaatgtgttgcatctcttttaccgtagtaatcagcttagtcattgttattaacctcattcataattttctttttatacgtatatgcttctgatggaaatgcaccagatttaacttcttgatcgtattgttttaaaccatccacaccaacactaaaatcagcaaattgcttcacaaatttcgctttatgttcaacaccataatttaacatatcgtgataaaccaatacttgaccatctgtaccttttcctgcaccaataccaatgactggaattgttaagtgcttgctaatttcttctgctaaatcatttggaattgcttcaagtactaacgcaactgcaccagcttgttctacatttttcgcatctaaaataagttgctcagctgcttctttcgttgcaccttgtaatttatatcccataacgccaacactttgaggtgttaatcctaaatgtgcaacaacaggaatacctattgccgttgctttttcaataaatggtgtaatatgcgctccttctgctttaattgcatttgcattcgtctcctgataaagctttagagcatgatttaagtcttgtgtcatagagatgcctactgcaccaatcggcatatcaacaactacaaatgtatttggtgcgcctcttcttactgcacgaccgtgatgaatcatatctgctaacgtcacttgtacggtactttcataacctaatacagtcataccaagtgaatccccaacaagaatcatatcaatacccgctgcttccacttgtttagcacttggaaaatcataagctgttaccatagaaattttagtttgcttttgtttcatatctattaattgacttactgttttcaatgttattcaacctctttttgcagtattattagaaatagtataatgaatcttttatagaaaggaaagaagaagatgttatcagttgcgattatcggcccaggcgctgtcggtacaactattgcctatgaattacaacaatcattgcctcatacaacgcttatcgggagacacgccaaaacaataacatattatactgtaccacatgcacctgcacaagatattgttgtgaaaggttatgaagatgtcacaaacacatttgatgttattattattgcggtcaaaacacatcaacttgatgccgttattcatcatttaactcatcttgcacatgaggacacgctcatcattttagcccaaaatggttatggtcaactcgaacatatttcatttaaaaacgtatgccaagcagttgtctatataagtggtcaaaagaaaggcgatgttgttacgcacttcagagattatcaattacgtatacaagataatacattaactcgacaatttagagatttggtccaagaaagtcaaatcgacattgtattagaagcaaatattcaacaagctatttggtataaattgttagttaacttgggcattaattctataacagcactcgggagacagacagttgcaatcatgcataatcctgaaatacgtacactgtgtaggcagctattactagatggttgtcgtgttgcacaggcagaggggttaaacttttcagaacaaactgtcgatactattatgactatatatcaaggttatcccgacgaaatgggaacgagcatgtattacgacattgtgcatcagcaacctcttgaagtcgaagcgattcaaggctttatttatcgacgtgcacgtgaacacaatcttgacaccccatatcttgatactatttatagctttttacgcgcttatcaacaaaatatgtaagcacatattaaagaccttaacgacgcatttaaaacatatcgttctaaatatcgctaaggtcttttaattatattagactattcagcttctctaatttcttctgccacatctttatagtctattttcgctttaacaaatgtctcgttatttaccgggaaatgttgttggaatgtttcaaagttttgtatctcaacgacaacgtcatccacttcaaagtcaagaacatgtccaccataagctctttcatcatccgcaaaatgtatatgaaaaccagcagaccctacgccatgaaataattctggtgtgaaaaatccaacaatggcaccacgaatatcttgtcttttttcttcaggttgtctgcgtgctgaatcaatcaaacgtgtgtatggtggttgctgagcaggcatcatacgtacatgcatatatttaaatgtgccataaattttaacagccgaaaataaattctcacttaacatttcatttttaatttgtgcgaatacatcatcttgtgataattgttgcaatgaaaatgtcttactcgctttaaaattagtaatcgatgcatacggtactttctcatcgccttttaattctataaattgtttatgctcgttagcatgatatgccttcccgtctaaaaatattacttcgccatcagaccctgttaacgttgcaatccctaaattcccatgttctaacaattcattaattgtagctgttccttctagtaagccagccattaacgttcctaatgtgccgtgttgatacaagacattcgtcattccaaaaccatctccctatagttattcctcgttgtcatgctctacttcgtgattaatgcagaactactttcctttatactcaatgacgcctcgacatttctattcatgtcactaaattttcacgagtcataatactttattcaattattattttacgcaaaagtattgcctctatcaatgcttgctaaaaaaatggatctatcagtgccacatgttaccgcaacactaatagatcctcttaccattaatatatttctaattaatacttaaaataggcttagtcttctaataaatatttaattgaatcaaatgtatcttctaatgttttaacagatttatcgaacaatgcttgttcttctgcacttaatggcatttcataaattttaactgcaccatgttggttaaccaatgtcggtacacctaagtaaacgcctttgtgaccgccatattgaccatctaattgtatagaaacatttaagacattattttcattatttaaaatggcttttgaaatgcgcatcaatgctaatgcaataccatagtatgttgaccctttagcttggataatttcataagcagcgtcacgtgtatttacataaatttcttccgctttagcttcgctaccagtttgttcttttaatgtgtcatatactgaaatacctgctacatttgcttgtgaccaaactgcaagttcagtatcaccatgctcaccaataatactagcgtcaacacttgaaggtgcaacaccaagttcttggctaattaaatattgtaaacgtgcactgtccaatacagtacctgaaccgataacacgttctgctggtaatccagtatattcttttacaaatcttgttaaaatgtctacagggtttgccgcgattaagaaatatccatcaaagccgctatccataacactcttaacaatgctcttcataatcttagtatttttttcaactaattgtaaacgtgtttcacctggcttttgaggtgcaccagctgtaataacaactaaatctgcatctttacagtcttcgtattcacctgctttcacatcaactggtgaaggactgtggactgtaccatggtttaaatcttgaacatctgcttttactttgtcttttgcaatgtcaataattacaaattcatcagcaacaccttgcgtaaccattgcaaaggcatagcttgatcctacagatccatctccgattaatacaacctttttaccaaatgttttcataattatgtctcctaacctaattgaatttattttacacgtgactacacgtaaaaatatctatactgaaattaaagattaacaattttattttattataatattatgctaccaaattacaaacataaaactgagatgtaaacggagtcaaattacactctatcgccaataaatattgatatctcaagctttagcacgtaatttgaaatttgtgacaatttttagcattctaaaattgcgtaacgacgctatttaaaggctttaacaaactattgagctttctatttttttcagtttaaaaaggatggcaattcgacttaaatgacttactatataacctcctattttccgccttacccttatcatatttgatgcatctttttatagtcaaagaattacatttcatacaaactagccaatcagatataaacatgaaattgattttaaaaatataatgcgcaaaattgttagaaaattagcaaaaaatagtacttattcatttaatatctgttataatcagttttatcatttaaaaaatctatggatgttatcaagacaagtcattaatacgtaacataaagttgtgatttttcagaatttttagacaaaatattgattatttgtgctatgatataacatattaaaaaacaccgtatagaattgtttatgaatgtttgggaggaaagtttatgggaagttttttcaataaaatagcacgaaaagaggatccggctatctatcaaaataaagatggtcatttaaagcgtacacttcgggtgcgtgatttcttagctttaggtgtaggaacaattgtatcgacatctatctttacgctacctggcattgttgctgcagaacatgcaggaccggccgttgcgttatcattcttactcgctgctattgttgccggtttagttgcatttacttatgcagaaatggctgccgctatgccatttgcaggttcagcctattcttgggtcaatgtattatttggtgaattttttggatgggttgccggttgggctttattagctgaatattttatcgccgtagcctttgttgcatcaggattctcagcgaatttacgcggacttgtaaaaccaattggcatcgaattacctgcagcattatcaaatccatttggtacgaatggcggttttatcgatattattgctgctatcgttattttattaactgcattattactatcacgtggtatgtcagaagcagcacgtatggaaaatattttagttattttaaaagtattagctattattttatttgtaatcgtaggtttaacagcaataaatgttagtaactatgtgccatttattccagaacacaaagtaactgctacaggtgactttggtggatggcaaggcatatatgctggtgtttcaatgattttcttagcgtatattggtttcgattctatcgcagcaaactcagcagaagcacttgaccctcaaaagacaatgcctagaggtattcttggttctttaagtgttgctatcatattatttgttgctgtagcacttgtgttagttggtatgttccattactcacaatacgcaaacaatgctgaacctgttggttgggctttacgtcaaagtggtcatggtgttgtagcagctattgttcaagctatctctgttatcggtatgtttacagcattaattggtatgatgttagcaggctcacgtttactttattcatttggacgtgacggtttattaccttcatggttaagccacttaaacgacaaacatttacctaatcgcgcactagttatacttactattattggtgttttaattggttctatgttcccattcgcatttttagcacaattaatttcagcaggtacactagttgcatttatgttcgtttcattagcaatgtatcgtttgagaaatcgtgaaggtaaagatctaccaattcctgcgtttaaattacctttatatcctgtgttaccagcagttacatttgttttagtattgctagtattctggggattaggattcgaagcgaaattatacactttaatttggtttattgttggtatcattctatatttaagttatggacttagacattctaagaaaaatgacgtagctgaataccacccaccaaaataaaaatcaaaaaaatcatttcccatctgattaacatccagatgcggaaatgattttttattttatattaagataatcgctattaccaaccttgtccagatatgtcatattgatctaagtcacctgcttccaaagcagtcagtgcatcttctatagtgtttaacgccgtgtctaattgctcatatgttatcaccaatggcggttggaatcgtaacacatttcctgctacagctataataactacgccatgctcaaagcagtaattacagattttaagtgccgcagtagcatcacgtgttttgaggtttttgtcggaaacaatatcaataccaatgctcagacctttacctctaacatcgccaacactattgtatttagatacccattgatccattcgtttcctaacatattcccctttttccgcactagcatgaagaagcgactgatcttcaatcatttgaattgtggctaatgcagcttcacaactaactggattagcacctgttgtaaataaatgtgctggtgcttctaaacaattcataatctctttgcgtccaacaattgctgacatgggcataccacctgctaaagattttccgaaagtgattaaatcaggcgtaaaattaaaatgcgagactgaactccatttacctgttcgcccaaaaccttgttgaatatcatcgacagcgattaaaataccatgttcacgacaaatcttttctaacgcttcaaaataccctggaactggttctaaaagtccaccatcgccttgtatcgtttcaataacaatacatgctacttcgtcagcaggtacatatttcgcaaacatttcttttaggggtgctaaatattcttctactgaattagcttgtggctgctcgtacataccacgatatttatctggaaacggaatatgataaaaaccattcaataacggaccataatgtttgcgcatatttaaactaatagctgacatagacaacgagccaaaagttgaaccatgatatgcattagtgaaactaatgatataaggacgccctgtatatgctctggcaaatttaatgatgccatcatttgcgtctgatccggttaatccgaaggtcactcttttttcaaaatctccaggtgcaatctcacaaagcttcttagctaaacgtaccaacggttcatgatacatatatgctggtgtataatgaataaatttatcaacttgtgcctttatcgcttctgttacttctctaggtgcatgacctacgttttgagaactcgcactcgataacaaatcgatatatgtcttcccctcaatatcaaccaatgttgctccatatccatgatcaatcaccaacggataatatttaatacgtcctgatttcgcaaaataatgttcatcctcttgaattaattgatgtgctttactcatatacattcccctcccattgacagaccttattcgtataattaccttccctacatcgataaccacattcgatttgatatcacgtgaaaatactgtcatgtcattatgaatactatccaatatactaataaaattcggatttgtaaatatattctgataattaagaattttatatcaatctactttgtttatgcgcataattttgttcgattagggaattgtttactatattccatttgactctgaggtgatatgaatgcgtttaaaagtattgttccatttcattgctgctattttcatatcattcatgttgctatggatgaccatgttgtttgacataattagcgatcaatcacatttaaacgctttattattgaatttagattttctaattccttctggcaatacaccatatactctagaaataatatgtcacttactaattggtagcgtcatttattttgtatttgtgtttctgtttcatacttctaaaaggctttactatctatgttatatccctttagttttcttatttatagcattgtatccctttttagtatttattgcgcaacgtccaatttttcaatttagtgtgacagaattaatcggttggattattacacatattttctttatgtcattaatggcgttagtcatacctagaataaaataatatttttaattaaactgacaattatttttcacattttatacacttttcaaggtttatgacttgagaaatgttctcatttttatcatactggaggtgtattgaaaagttaaggagtggaaagtatgaataaagagcaattagaaaaaatgaaaaatggaaaaggctttattgccgcattagaccaaagtggtggtagtacaccaaaagcacttaaagaatatggtgtaaacgaagatcaatatagcaatgaagacgaaatgttccaacttgttcacgatatgcgtacacgtgtggtaacttcaccttcattctcaccagataaaattttgggtgctattcttttcgaacaaacaatggatcgcgaagtagaaggcaaatacactgcagattacttagctgataaaggtgttgttccgttcttaaaagtagacaaaggtcttgctgaagagcaaaatggtgttcaattaatgaaaccaatcgacaacttagacagcttattagatcgtgcaaacgagcgtcacatttttggtacaaaaatgcgttctaatattttagaattaaatgaacaaggtatcaaagacgttgttgaacaacaatttgaagtcgctaaacaaattattgctaaagggttagtgccaattatcgaaccagaagttaatattaacgcaaaagataaagctgaaattgaaaaagtattaaaagctgagcttaaaaaaggtttagacagcttaaatgctgatcaattagttatgttaaaattaacaattcctactgaagctaacttatacaaagacttagctgaacatccaaatgttgttcgtatcgttgtattatcaggtggttacagcagagaaaaagcgaacgaattacttaaagataacgctgaacttatcgcaagcttctcacgtgcattagctagtgatttaagagctggacaatctaaagaagaattcgataaagcattaggtgacgctgtagaatcaatctacgacgcatctgtaaacaaaaactaatttatacattaaacgtattttttgatataaactactaaaaaggactcatacatgtgctttaaaagcattgtgtatgagtctttttgattaaagttgattttgccgtatatattatagattacgcgaaaaaaatcggacagctgaaaaatctataagatttctcagttgcccgattttaaatatagctattagaatttagttttcgtagtaacctaattctaagtcttttgaagtttgtttacggatttttctcattaatttttcgtcttcaattaatgattcaccgtatgatggaatcattttcttgattttaggtgcccattcagttttgtattcagggaagttacgttctaatacttctaacgcaactgaaactgaagttgaagcccctggtgattcacctaataatgcgattacagtgtggtcttgtgagttaaccacttctgtaccgaattggatgaatcctttaccgtgttcaggtgtatctttgataacttgtacacgtttaccagcagtgtataattgccaatcttcattacgtgcttctggatagaaagtacgtaagtggttcatacaaccttcttttgtcataatcacttggtcaaatgagtatttaattaaaggtaagtttttaacagctgctgctaataaagttgtaatgttgtatgttttaactgatttgaataaatctaagttagaaccatttttcaagaatttaggtccaacattagcaaatggtccaaataataatgttctttgaccatcaatgtaacgcgtatctaaatgaggtacagtcattggtggtgtaccaggtggctctttaccataaactttggcatcgtgttgttcaataacttgtgggtttgtacaagctaagaattgaccactgatagggaatccacctaaatgtttactttcagggatacctgttttttgtaataatggaattgctccaccgccagcaccgatgaatacatagtcagttacttgtttgaatttctcaccagttaggcgatttttaacagtaacttcccattgaccatttgataattgttcaaaatcaacaacttcatggttaaattgcactgtagcatttggatgtgcttcaatgcttttagccattttacgtgttaattcaccgaagtttacatctgtaccttcgtcaattttacttgccgccatgataccagggttatcttcacggcctttcatcatcaatggaatccattttttcattacttcgatgtcttcagtatattcgatattatcgaacatagggaaagctttcatcgcttcgtaacgatcttttaagaatttaacattgtttttacctctaacataactgatgtgtggtaatggattgataaattctcttgggttctcgatgctaccgcttttcactaagtgaccccagaattgttttgaaatctcaaactcttcgttaatcactttcgctttttcgatgtcgatagaaccatcaggttgtaaaactgtgtagttcaactcacataatgctgcatgacccgtaccagcattatttctttcgtttgaactttcgattgcaggacgatccaagcgttcgtaaacgtggatattccagtctggctcaatttcttttaacattgaaccaaatgttgtgctaagtacaccggctccaattaaaacgatgtctttactgttagacttagccattggtttcacctctccaaaaattgtaaatgtgtatcatcaatatgaaagttacataaaactgacatatttctttaaaatatcaacgccatagataacttcctgttttaattgatacgctgtaacaaaatactatagttagtgcttacatatatatgttaaagcaagcagtggtaaatgtaaattataattattcattaactttgcaatatattaaatcttttattcatagaagataaatatcaaatcaatcataattatttgacaacaaatcgttaacgattgttttaatctacatttggcttatagcattttaaacctatactctattttgatacaatataagtgtaaaatcaatcataaaaaggagattcaatatatgcatccaagaaatacatcacaattacctttaatattgaaaattattttgaatcttgcacttataggcattgtaattatcgttctaacacatactgagtttcaacttaatgccggtgatagacatgtatttttattaacatgggatattcgaggtttgaaatcttatattttctcattcttaatagtggttgcgcttgtttctaaactaattttaatatttataactagacgacaaagaacatcataaataaacaagcagtccagtgcgtatcatcataccatacgcattggactgctttactatgctttttaattgttatctttttgtttttcccacttttctatttcagcatctcgtagttcaacacgacgaattttacctgaatttgtttttggtaagtcgtcaacgaattcaatctctctcggatatttatatggtgcaacttcatttttaacaaattgttgtagttctttaactagcgtatcatcacccgcagtatggtcctgtaaaataacgaatgctttaacaatattccctcgtatatcatgaggttttgctactacagcacattctttaacggctggatgattcgttaacgcatcttcaacttcaaaaggcccaatcgtatagcctgaactaataataatgtcatctcgacgtccttcaaaccagaaataaccatcatcatctacatgagctaagtcaccagtgatgtagtatttacctgtttgcgctttcgccgtacgttctggctctttataataccctttgaaaagtgctggcaaatcaagtggtactgcaatattccctttcgtattagcaggtacgctattcccgtcatcatctactacagtgaccgaactacccggaatgcctttacccattgatccaatcctttgtggtgtatcttttaaaaagcctataagcaaggtactttcagtctggccatatccatctcttacagttaaattaaagtatttcttgaattgttcaactacttctcgatttagtggctcacctgcagaaacggcactatgtaaatgcgttaagtcataatcatttaagttctgtaatttagccatcatacgatattctgtcggtgtacaacataaaacattaatttgatatttttgaagcaattctaagtatgtttcagggctgaatcttccattaaatacaaaagcagttgcacctgaacctaatacagataagaaaggactccatacccatttttgccaacctggtgctgctgttgcccaaactaagtcatcttcattaatacataaccaatgttttggtgccatttgtaaatgtgcaaatccccatccatgacaatgtgtaacggctttaggattgccagttgtaccagatgtatatgacaaaatcgctgtatcatctcgcgtcgtatctgccatttctagtttgttgcttgcattttccttctcagattcgagtgaaatccatccatctttatgaccagcgataacaaatttagttaacgcatcatattctttaattttttcaaattcaactgtgaatggctctaatgcaatgactgcatttatttcaccgtgtgtgatacggtattgtaaatctttagttcttagcatctcagaacatggaatgattgcgacacctaattttaaagcagcaatatataattcatacgtcgcaatagatcgtggcatcataatgagtactttatcacctttagataaaccgtgcgatgctaaaacattacctactttattagactgttcaatgagctgttggtaagtgactgatatatcttcaccttcagtattatgatataaaattgcctttttatctggtatgtggctatatttttcgatttccgaaataatgttatatttttcaggcgcgaatagagctgacttttgcataactaacttcctttcatacatccacttttcctgtgatgaacattgtaattttataaatgaattatatatatcatacgcctatctttacagaattttcaattaaatagggttaaataccaaagtcctcgacactacactttgacatgacgtagcattcaaggactttcaaatgattgagggttgatatctcgggctagaccatatcagctaattcaatacgaatattgtatgataattcacgattaattatttttacatctgcacctttcgaagtgccacgttgcttgtgtgtatgcttgtactcagctgaattttgccaatgataaaatgcttgcctattttcccacagcgtaataatgatatagtgtctaccagctgttctaggtcttaaaaaccttaatgctttaaacccatcaacgttttttaaatgcttattacgttgcaaaaatttttgctcgaatgtttcttcttgtccttcgttaatatataaatgatttaacacacataatgaatcatttgataaatcatttatcgcttctagaacatcgtaatatgcagtgtcattatttttttgtattgtgagacaatcatccagttcttctattacataacttctatattcatcataaatgttcataataaatgccttcatttcatttatatttttggtcatattactttatatctattactaattcattcccgtatttattaattacaatcatagtttggcttctttttaaaaggtaagactttgtaaaaagtattaatatttcatacaaatggggacaggagtcgccctctatttttgtgtcttcaatttcatgatctatattggacattagtcatgaaaatagccgacaacttcatctgtgaaatcaccggccttgtattttagctaactttatttctgattttacgattttaattgatcatacagagaaagtgatcttttaacaatttctaaaaactcatgatctatattggacatttgatgaaaataagacaaaatgttttctgttagcttctcttgttttgggaatgaatcatcttctttaatccaaatcgctaattcgcctaacggtgttttatcatctttaaatgtttgtatatattcgtaaaagctcatagtattccttctctcaatttacttatataaatcctaccacgaaagctttcaagaaaacacaattaaatgtctatttagtgaactttttaaggttatgcactcttttaatgtctgccaattaggtcaattaatcatcacaatgtacaattaaccctattttcagttcatatactcacacaccgtttttgaacaacacattaacttctcatttaaataaaacgcaaaaaagcctggcaccaatacaatagatgccagactaagagtctactatataaatttatttagcgtatggttttacttcgattgcaccttcattttcatcatgaacaccatgcttataataatccacatattgaggttctaaaggttttctgccacgtataatatctgcagctttttcggctaacatcaacactggtgcatggatattaccgttagttgtacgtggcatagctgatgcatcaactacacgtaaattttccataccgtggactttcattgttaacgggtcaactactgccattggatctgaagcaggacccattttagcactacaagatgggtgtaatgctgtttcaccatctctacgaacccaatcaagaatttcttcgtctgtttgcacttctggtcctggtgaaatttctccaccattgtatggatccattgctttttgagataagatatttcttgctacacgaattgcttctacccattcttttttatcttcttctgttgataaataattaaagcggatacttggtttttcgaatggatctttagatttgattttcaagctaccacgagagtttgaatacattggtcctacgtgaacttgatagccatgtgcgaccgctgccttttgaccatcatatcttacagctattggtaagaaatggaacattaagttaggataatcaacttcgttatttgaacgtacaaatccgccaccttcaaaatggttagatgctgctgcacctgtacgtgtgaaaatccattgtaaaccaataaatggcatgcgcttgatatctaagcttggctgtaatgatacaggttccttacatttatgttgaatgtatacctctaagtgatcttcaaagttttcacccacaccaggtaaatgaacacgtggctcaatgccttttgattttaggaattctgaatcaccgatacctgataattgtagtaattgtggcgtattgaatgccccaccagacaaaatgacttcattagcatcgatggtatgtagtttgccatttttcttatacgtaacaccagttgctcttctaccttcataatgaatttcagtcacaaaagcacgtgtttctacggttaagtttttacgcttcatcgctggatgtaaatatgctcttgaagctgacattcggcgaccacgatgcacttgactatcgaacggtccaaaaccttcttgtctaaatccattcacatcaggtgttttatgatagcctgcttcaacacctgcatcaaagaatgactggaataaaggattcgttgctggccctcgttttaacttaattggtccatcatggcctctaaatttatcataaggcgctgcaccgtatgttttttctaattttttaaaatacggtaaacagtgcgcaaaatcccaagtttccataccttctggttctgcccagccttcatagtccattggattaccacgttgataaatcatgccattaatcgaacttgatccacctaaaactttacctcgggcatgtgctaccttacgaccgcccatatgtggttcttcatctgttgaataaatccaatcgtaaaatttgttgcctgaagggaacattaacgcagccggcatttggataaataaatcccaaaaataatcactgcgacccgcttctaatactaatacttctttatctttatcttcacttagacgattacccagtacagaacctgcactacctccgccaatgatgacataatcatatgatttgtttttcttgctcatcgttatgacctccaaagtttgttgtatttcaaagtgagtaatgtatgaaataattgatcgtggctgcttggttatcgttgaatttctaaacttagctaaccaaacactcgattttctttatatgattgttactaacagtcatgaaataatctatgattcatttttcgtttagtccaaattatcaatcaacatttcgctacttatacaaaacaaagtgagtgtcttgtgttcttacaatggcactcaccttatctaatttttatttgctaaaccaattcactaattgtggatttgtatttgttaaaatgtgttttgaaacaaggtactcttctaagccttctttgcctaattctctaccgatacctgattgtttgtatccaccccatggcgcttgtgcaaaatatggatggaaatcattaatccacaccgtaccaagtttcaacttgttagcaacgcgttgtgcttttccaatatctttagaaaatatagcacctgctaaaccatatatagaatcattcgctaattgaatcgcttcttgttcagtttcaaagccttctacagtaacgacaggtccgaaaacctcttcttgtacaatacgcattgacgtatcacaatttgtaatgactgttggctcgaagaatagaccatcttttaaatcgtctctatctggacgtttaccaccaacagcaattgttgcgccttctgctttagctacatccatataagattcgatcttattacgatgttctgttgaaatcactggtcccatttcagtatcagcatcaaaaccattacctagtttgatttttttcacgcgatcaataagtgcttgctcaaatttgtctttaatactgttttgtactaatattcttgatcctgctgaacaaacttgacctgcatggaaatatccaccatttaacgcttggtctaccgccaattcaaaatcagcatcatcaaagataatgtttggatttttaccgccaagttccaaggcaatatttgtaacattattagcagcatttttcataatatgcttaccagtctcaatgccacctgtaaatgatacaaggtcgacctctttatgacctgacattacgtcaccaacttcagaacctgcacctagaataagattaattgttcctttagggaaaccaacttcttccattaattcaaaaacacgtattgttgttaatggtgtaatttcacttggtttcataactagtgaacaacccgtagcaagcgctggcgcaattttccatgatgcttgtaataacggataattccaaggtgtaatttgtgtaactacacctactggttctttaacaattttgctttctgtatctggaattggtgaatcaatcatttcaccaccgtctttatctgctaatccagcaaaatacataaacacattatgaatatcatcaatatctgcatatgattcttctaacgtttttccagtatctaatgtttctaatcgtgctaacgcttcgcgatgttctttgattttgtccgcgatggcacgtacttttttacctcttgtttcagcagtttcttgcgaccattcaccagactcaaacgcacgtcttgcagctaagattgcacgttctgcatcctcttttgtcccttcagaaaccgtaaatatcacttcttgattgtaaggattgataatatctcttgtatttttattcgcgctttcaacccactcaccatcaatatattgacgctgagataaatgttttaaaagttccattcaacaacctccgttaagtttgttaaatttttatttaacgaattttacaaacttatgttagcatagaaatgaaaaatgtgtcaatttacaaaacaactaaagaattaagttttgtaagttcgttagatttttatttaacgaaacatttaactttaatgctttaaatatttttaatgtctttttttagaaaaggttttataatgtattagtatttattttaacgtgaccaaaatgatgtacggaggtgcaatgatgactcgttctcagaacaaacagcaacaattagaacaagcaaaagatattgtaattaattcaattggacagacaatggatttgtatggcactaatagaagtgtaggaaacttatatggcactatggtgtttgaaggcagtatgacgcttgatgaaatgcgtcatcaattgcaaatgagcaaaccaagtatgagtgctggcgttaagaaattgcaggaatttgatattgttaaacaacaatttacgagaggaagccgcaaacaacattttatcgccgagaaagactttttcatcttttttcgaaactttttcactaaaaaatttcagcgtgaaattgacatcaatgtcgaagcagtaaaagatgctcaagctattatcaatccattacttgaaagcagtgatttaactgaagctgaaacacaagaggcgcaagaaattaaagctcagcttgatcatacacatgtttattacgaatggttagaacagttaaccgaagcgattgaaagcggtgaaattttcaaatatttcccaattccagaacaaccttctgatactgaaaactaaaattgactctaacagcgacaatgatgattatgcaaaatgaaaataatgcaataggtgcacgaaataaacggtaacttctatctcaataaatagaaattaccgtttttgcttaatatgacaatcaatcatatacttataaaattcaaaatcttatgcatcatttattaaattataaattatcatcttgttcttcttctgatacttgaacgattcgcaatgaacgacgttcaacttcttttaatttttcagcccgcgtttcaagtttaattctatcgcgtcctaaaatgattaaaaatgatatcatcatgaaaataaaaataacaattaatggcacacttgccagtattgaagcagttttcaatacttctaatgcacgttcgccaccaactaacatcaatgaaaatggcaataagcacaatgcaaatgcccagaataaacgattggcacgtaatggttcgcctaccacttttttctgagatgctgccgctaaaatatatgaacccgaatcaaatgttgttgctaagaataagaaagcagatactaagaatagtacaatcatcaatgatgggaatggtaaatgatgcaccacttcaataatggttgcctctgtaccatgtgtatttaaatattgtgttacattaaactgtccagaaatttgtaaatacacagcatagttaccaaaaataccaaagaataatacgcatccaagcgttccataaataattgttcctagcacgacttctttaaggcgtcgaccttttgaaattctagcgataaataaaccgataaatggcgcatatactaaccaccatgaccagtagaatattgtccagtcttgtgggaaattcgtttcttttcgacctttaataccaccgaatggttctaaccatgtcgccatatggaaaaaatctctcaacatatttccgaatcctgtcactgtcgtttccataataaaaacagtcggtccaataataaatataaaagctaaaagtacaaatgatagccaaacgttgatatcacttaacttttgaataccttttttcaatcctgtatatgaactaatggcaaatataaccgtgattgttaataaaatggccgaacgtaaaatcatatttttaccatctaaaccagttaatctttctatgcctgcagaaattaatggtacacctaacgctagtgatgttgccgcaccacctagcaatccaaagataaataagatatctacaactttacctacaaatttatctgtttgaccttttaaaatcggacgacaagcttgactaattttatacaccggttgttttttaacaaatactaaataaccaattggtaatgctggtaaaacataaatagcccaagcaattggtccccagtggaacataccatactgcgtcgcatattggagtgcttcatcactcatacttttcgcgccatttggtggaacttgatagtaaaaagcccattcaataacgccccagtataaaatatcagagcctatgcctgcacaaaacagcattgccgcccatgtaaatgtattaaattctggtttatcacttgctttaccaagtgtgacattaccatatttaccaaatgcgatatacattacaaagcaaaaaatcgccagccccataaataaatatatcgaaccaattgaatcagaaatggcactattaataccagtgatgatatcttcacttgcttttggaaaagccatcataggtataactgcaaaaagaagtacagctactgtccctataaaggtcgtccagtccataactttctcttttttcaattgtgctccccctaattattaattttatgaatcctgtttcgatttatctcaaaatgtaataattatattgattcacaaaattgacaataactaatatttaataataatgcaaatttcatacaatttgaaacttggcaattattgaatatttatataatttttctcataataaacaaaactttaatagcgctaaaacaactgtgttaagttatgatttaacgaatttaacaaattttactagaacggcatttaagaatatttatacgttattaacgaatatttattcattgtaaaacgctaccaaaaagttagacttccttcccactaaaataccacttttctctttcaacttttttaaaaaacggatatgcaacttttaatattggtatcaaaatgattgttaggtcatattctatcaatatatttttctaaagaactgcttttattaactttcaattatgtacctaacataaaaagaagccaaggcaacggatgttaccttgacttctaatacatattcaactaacaatatattcaatcatacgcgcatgcgagagtgattgttgtacatctataatgcgttgatttaaagaacctttatatggtaaatcaggtttgaataagtgttgtataaatagcccatctactaaaacgtcaatgtatgataataactctcgacgttctgtacaatcatttgctaaatattcatataaaaatccagtccatacccaaattgtctttgtatttccaaaacgtgctcgaaatgctttgacaagatttaatgtaatatccaaattacaaaatggttcgccacctaatagacttagcccagatatataatcatgatcgcaatcatctaatatttctgctaatatttcatcagtgtatttctcgccatatctgaacttttgtgaggctttgttgtaacatccaacacaattaaatggacatcctgatacataaacactgcatcttactccttcaccgtcaacaaagctatttgattctattttagcaatataaccttgtccttgtttaatgtctaaaagtgtcattctttaggcgctttcatatgttttactcgtgcgcaaatttctttatgacggcctttaattactggacgttgaactggattgcctaagtaaccacatgttcgtttaacgacatcaactgttttaggattatcattgccacagttcgggcatttaaaccctttttcagttgcttcaaaatctccatcgtaatcacattcataacaatgatcaatcggaatatttgtacctaagtaaccaactttgtcataagagtagtcccataccgcttctagtgctttcaaattgtgttgcaatttcggatactcacaatagtgaatgaaaccaccactcgcataataaggataatctttttcaaaatctaacttttcaaaaggtgtaacatctttacgtacatcataatggaaagagttttggtaatatcctttatctgtaatgtctttaatatctccaaatctctcttggtctaaacgacaaaaacgatccgttagcgattcactcggcgtactgtaaatactgaaccaaatgtcatataattctgtccatttcgtttgataacgtttcatttctttaagaatttcaagtgtaaatgcttttgcttcttgagatgtttcccagtctggaccatagaaaacagtagctgtttcatacaaccctatatagcccattgaaatcgttgcacgtttatttttaaataactcagcaacatcatctgtttcttttaatttatagttaaaagcgccacttttatataaaattggtgcgttattcggtacagcatcttttaaacgatttatacgataaagtaatgcatcgtgtaagacatcgatacgttcataaaagatttcccagaatttcgtcatattaccggcagattctaatgccattctaggtaaattaagtgtaacaacaccaagattacaacgaccattattttcaaaatgaccttccgcatctttccaacttggtaaaaatgaacgacaacccattggcgctttgaaatcacctaatatttctacgagtttgtcataatttaaaatatctggatacatacgtttcgttgaacactttaatgctagttgtttaatatcatagttcggatcttgcggactaaagttggttccttttttaattgaaaatacaagttttgggaaaatcgctgtcgtgcggtcttttcctaagcctttgatacgagtatttaagatagcttgttgaattttgcgacttaaatgatctgtacctaagccgaatcctaatgttacaaaaggtgtctgtccattagatgtatataaggtattaatttcatattctaaactttcaatcgcatcattgatgtctttagtgacttgttgatcaacataacgatcaatttcagattctttgacaaattgctttgcgatattcctatgttgttcttcattatgtcgtgcatatgtactaagtaattcgtcaacgcggtcaaccgtacagccaccatattgactgctagaaacattggctataatttgtacaagctgcgctgatgcagtttgtattgattttggtgaagttacattcgcgttgcctatttcaaatccattatgtagcatatttttagcatctattaaacaacagtttgttaacggttggaatggatgataatctaagtcgtgaaaatgtatgtcccctctttgatgtgcatctgcaacgtgctttggtaataaatgatttaatgcgtaagatttagaaacgatacctgctgttaaatctctcattgttgaaaatgtatcactatctttgttggcattttcattaacaatagcaggatctttagaaatcaaacccgttaatgcttcttcgatttgattcattttaccccttcttcctatatattgtgtctactcattacgttataccactatatatagtattttcaaatttttattagtctgttaactaaaacgtcacaaagttattaacatttagtgaaattcatatttctacacaattatttcattaatttttaaaattgtttaaagattcgtccgtcattttagcatagttacattccattatttcattttgcaacgtgatattattttcacattatgccacttaaattgtcacaatgcccattaacatcgcaattactaacatcacgatggcgaatccccaaatccaaaagaatgcatacttaatatacgtgcccatgtttgcctctgctaaaccaattgccaaccataaggctggtgaaaatgggctgacaaatgtgcctataatattccctatgaccattgaataagctgttgataaagacggtacaccaaattgccctgctgtttgttcgacgatcggtaacacagcaaaataataagcgtctgtactcgttaataaatctaatggtacaccaagcaatccaacgataatatgtaagtacggccctacttctgccggaatcactttaattaagtctgtcgcaattgccttaagcatccctgtctcgttgagcacacccaaaaacatacctgctgcaataatgactgccgccatcattaatgcgtttggcgcatgcgctcttaatcgctccatttgttcatccactgatttaaaattaataacaagcgccaatgaaacacctatcatgaatgcaaattcaggtggcgcaatatttattaacatcgctagaataacagctaaagttaaaacaatattcatccactttatccatggatttgttcgtgcacgcccttttacagggaattttatatcttgatctcgttcatatgcttcgaccaatttatgtacatctatatcttgtgtttgcgtcaattcattgctagcaattgcttttttgattcgtttttgttctttaaatccaagatataccgcaaacaacataacaagaatgaatcctattatttgaataggaattaatccataccataattcattgacacttttggcttttaacactgcagctacacgtgccattggacctccccaaggtaccatgttcataatcgccgcgcttaatgctaatagtagaatcaataaatatttattcatatttaacgctttatataaaggtaataatgcaggaatagaaagcaaaaatgttaccgcaccggcaccatctaattgggctattgtgccaattaaagctgtcattgcacagactataacgacattgcctcgtgtcattaatattaagcgtttgacaagcggcttgaataaaccactatcgttcatgatgccaaagaaaataatggcgaagataaacataataacaacgttgatgacttgatctaaccctttagcaaaaaatccaaccaaatctgtcacactatatcctaaaatcattgcccctaagcaaggtatgattgtcatacctacaactggatttatctttttggcaatgagtaaacctactattgaaataataataatgagccccattactgttaaccacatattatcactactcatattattttctccctccacttttaatacaatttacataatccccctctttaacttaaatataataattaatataattttttatatttaagttaactcattttatcaaaaatttcttttttgtgtaactatcaatagtgaagtttgattttcctacttgataacatggcatgactaatccttgtatatcctgtcctgtacttcattttgatttatcctttttattattgctttctattgcacaaaaaatctggctaaaggtcgctatgatagtaacgacttcaaccagatttcaatttatccatctattttattaagtttgttctacgtatctttttctctattgtaatattcatatttaaaacgcatatcattatcgcttaaatccttcattattagacttttcacaaagccgcccatgtcttaatttcaatgattaagcgttaaagttaaaataagaaggcttaccttagacggtccgctattattgtcttacatccaaccacgctaaaaattgagcttgtttgtcatgatttaaatattcttgtgacacaatttgtgacagtaactgctgcttttcgttatatgttatatctagtaactttattttctgtcggcaagtatataaaaagtcgatatacgaactgtatgatggtggatataatgcctcaagttctgccataatcgattttgtcaacttaggactcgcaccattagttgatacactgatagttagcttgtcgcggtgtagtgcacttggaaagacaacattgccatttgatgcatctccaacattattaaacaacgtatgctcaggtaaggcttgttttaccgcttcattaacacatggctcattggttgctgcaataactagatacgcgtctacaatatcgcttggttcaaactctttttccttccatatgacgacacctttatctaccatattttgaagtttttcagtgattgtcggactgatgaccgtcatatgttcaacgtattggcttaatgtttgtgcccgacgacttgcaacgacgcctccaccaactatgacgacatttttatttgttaaatctatcattaatggcatattcatgttgagcaacatcctttatataattttacatcattacaccttaaaatatttaacaccaatcactaataagcatcacgttgatagcgttgttgttgtttcatttgtcgcaataataactctgcttcttcttgagaaatatgacgttcttttaccagtacatctttaatggcttgatggacatccttcgccatacatttttcatcgccacaaatatagattgctgcgccttgctcaatccattcattgaagcgttcactttcttccattatacgatgctgtacatattctttgtgttcttggtctcttgaaaatgctaaatctacgcgtgttaagtttccattttcaagccattcttctatttcttcttcatataaaaagtcagaactacggtgttgatcaccaaagaacaaccatgtttttccagtcataccaagttcttcacgttcttgtaaatatgctctaaaaggagcaattccagtacctggtccaatcataataaccggtatatcttgcttcatcggaaatttgaagttcggatttttcttcaaataaattggtactatatcacctggtttaatacgctcagcaaaatgaaccgagcatacaccttttctctcacgtccatgtgcttgataacgaaccgtaccaacggtaatatgcacttcatctggcgttgccataaaactactagaaatcgaatactctcttggtggtaattttctaaggatttgatacatattctcaggttgtaattctatagttggaaaatctgttattaaatctataaagtcccgatttataacatattcacgcgcccatgactcatcttgaatacgttcagataattcttcattgtcaaaatagatatctgcatttttcaataatggcaatgttaatttagtaaattcaaaatgtgatgttagtgcttcaacaataggaactgtatcaccatgatcattaattggcaccggagattgcggatcccaacctaacatggatattagtttttcaaccaattcagggtcgttttgcggtaatgctactatacaatctcctggttcatatgattcactaaaatcatcaagtaaaaattctatatgtcgtgtttctttatttgaatcggtaccatttaaattgatattcgctaatacttctgcttggtatggatttgatttagaatatttcttttctttggcagacttaattgattcacttatcaccgattcactttgaataccttctgatgtggtatcaatcatattaatgatgtctgccatccacttttctgcgtcttcttcataatcaatatcacaatctacacgcttacatatacgctcagcgcctagattttctagtaaagcatctacatctttaccggcttgacagaaaaattcatatgtttgatcacctaaagctagtactgaatatctcacatgatttaaattaggtgcgttatcgtcttctaaaaattcaaagaaatcccatgcattatcaggcggttctccttcaccatgagtagacgtaataataaataaatcttctaactgtgcgatgtttgtcgtatcatattcatccattgacatcaaaacaacttgatgtccgatatcacttaatcgttctgaaaaaatttcagctaaacgcatggcattacctgattcagaaccatatagcactgtgacatgccgctgattagcttcgatatgtggctctttattttgtaacatatacgttgttgaagttgcttgttcttctgatatttgtgattgttgcctcacttctgtctctaattgttgttgattactatcatttgtcatatcgctactattagctaataaaaaaccactaagccactgttgttggctctctgttaatgtttgcagcagattgttaatctctgtgacttgtttttctgtaaatggactattagatgtatttaatttcaaatattttcacctcaataaacttgaaatagatgattgacttattttttatcgatagtttagtcaattttttaatatgtatcgtataaattaaaacaaacttgagttgtgtctgatagttatacttacaaatatttacaaccttcatgttgcttgaatgacattatcagtaattcagacaaaactttgattatgtcgtgtcagttattaatacatacagtaatgcatcgttgttattttttatttactatttattatgtaccaaatcagcctgtcagtaaaataggtcaaattactgattttctaaatataaaatgcctcctaatgacatacttttagtacatcattaagaggctcttgtgttatttgcatactaagcgctcaattttaaatttaagatgaagattcttgcaataatatttctatatttgccgatatatccaatggatcttccattggcaagaatcgatttacgacattgccttgtcgatcgattataaattttgtgaaattccattttattggggacccaaagattcctggttgttcattctttaaatgcgtaaataacggatgttcatcgttcccgttcacagatattttagctaacactggaaatgtaacaccaaatttctcacgactaattttcaagatttcttcattagaacctggttgtcgattgtcaaaattattattcggaaaactcaacactacaaatccacgatccttatatttttgaaacaaagtctctagttttttcaattgttcgctatatatacattctgttgcagtattaacaactaaaatcactttacctctaaatgcttctaatttataagttaagcctttatagtcacttacttcgatatcatacacatttctattattcataagacacccctacacagccttttttatattgaatatgttctttttagaatgttctgataaaataagtgcgcgtttacaccgcgaacacacattatatagcgtgatacacttttcaaacacacgataaataatgttcgagtttatgttgttgctcaacctatccgatttaccgtcttttttcacctgtcttactttattaaaataatcacattgtatagctgtattagtccagctacaatatctttcgttataacccctcattataatcatccttattttctatttttaaaaagacaattagaccgctctttaaactatagattaatacttaagttaaactcatacatactgataccatacgttaaatctaacaatttaaaactcgttataactatggattaaagagctgcccaactcatataatccttaaaaacttcacatgtgattgtttattaagccctcctttatcttattaaatatccttataacccttttaaaattaaactgacacactcatacattgttacacgcgacgataaacgtcatattattgcatatcattaaaacaagtcactttgtatcgtgtgcgaccgaatacatattaaatcatcaataatgattattcaattattaaaaataaaaacgaacattctatatagagtttccacttattgttttttcagcattgtcttcattacttaacattcgtgtttgtaagtaatattgaccaccaatatttagacactttataagtatgccattcatcatttttaatcatattatttttcatattggtatttctattcatatatttctgattgtatacttagaaataatcatttgttattggaaaatatatgaaacaaatttgactcatctttttcaatatctaaatgacacgatgcatgatttttagattttgtaatcaatttacttttaatttcctttaaaattagactgaattgtgacaattttcaaacattttaatgtgtaaatcattggaaaaatatacgaattgcatttaaatcgtcaatttacatatatttttgcgtagtaatcaatcgttatcattgttatttatcgttacattacttcgagtatcagtatgtatttcgggcttcgtttgataacgacatttctttgtgacatcgcttcatcagtgtaacaacaaatacaatgatttcgtgatgttaggtacccattttatgtgttgtataaaatatgttgttataaaacattttaaatcattttatataaacaggctatatatttttgatatttcaaaaatataacttgtcatacaagtaaaacaaccgacaagatattgtgtcttatcggttgaaatttgttattgttatttgtaatgtttttaggtttctttttaatataatatatttcagtgaaaatacatgattgattgtgatttcactgaaacatggttaattacgttcttgatgaataactttagcataaatataggaagttattttgtacatcgccatatatagaaacgaaattataatgacagctagtacgtaacttgttaaaaatatataatggttattaatccctagcatatttagtaacgtataaacaatgttgctagaaattaatgtatgaatcagtgctactgttattggtattgcgaacaagaaagtcatttgatttcgtgttatctttgatattctcccattatctaaaccaagttttttcataatgtcataattgtgctgatttgcataggcttctgaaacttgtttatagtacatcattagaaatattccaatgacaagtacaattgataccacgccacctacaaatattagtccacctgtcagacgatcccaaaccattagcatttctgatttagaatttattgatgcatcgtactttttcgaaagcttttgaatttgtgatgttgttaatttcgtctttccagatacattaaagtttatcgatattgtcgaattcttttgttcatgtgcataaaatccttttactttttgtaattgattgttatctttaacaattaaaaccatactatcttgaatcatcatcaaatttaacgcatgtgcgtcaagttgtttcactttaaatacttcattattaagaccgaccttagactgctttttaaaaataggtacattcgtaatcatacctatactttgattgtctaagtgtaattttttttggtgatatcgattataatcttgtgcagtaaaagctgtaatcattactgattgtcttgaaaatatcgcgccttcattaccaatgaagtctattggaatatcaccactagcctgttttaacttgtaataagcacgattcctttctaaagaagctctaaataatgtcgtttcatatactttgaagtcttttgcattaaccgaaccctgtatatcacgtttaatatgctcaatcgtttgttgacgttctatttgtgacttagaattgtcgttaaatgacaaatcataatcattggtaatcaatttcataatggtatgattcatatcgcgataggttgttaatgtcattgtgagcgttacaatcaaaaatgtacacagcaaagtgattgttgcaagactgactgcattcattttaagacgtacacgcatcccaactaccacaaaaaaataccgtggatgatagtaaacttttgatacctgctgcaatatactaataattatttcacttatacctacaaaaaatgcataagtaccgataataactaagcctatgacaatccatatttttaaaaaggcaccaaacgtcgtatcttgttgtaatgcaataaagtagcctaaatatagtgctgcgcttcctataacaattaaaacgtaacgcaaccatcgtgatatgacactggaatcggaacgatgttgataagttatcggtcgttgaaaattaatactgaacaagttgaatataagtagcatgcccattaatacagcaatgataatcaaagtaataaacatcgctacagagtcaaatggataataccttaacgtcgcaacttcactgcccattattttctgtataaacaagaaaaatatcgcgccaagtaagtatccgccggcaatactaacaactgaaattattataaattgtaagatagtttccatcactacaattaaacgcatactttttttggtcatacccaatgtcataaaaatgctaaactcttttcgtctttgtgacatcataaagtgatttgcatagaaaataaaaataaaagttaaaagcgccataaaaaaattagctatgataataaatggtactaggaagtcattcttctgttttatgtagctatttaatccaattgacacaagcgtatattcaatcatgcatagtacacttaccgctaaaatgaatggaatgattacaagtcgctgcgtaataaattgacgtcgtactatgtgccataacaatcttaacttcatatattgacgcttcctccattcacaagtgctaagctatctgttattcgttgttgaaaaactaatcgactttcttcaccacgatatatttcatgatatagacgcccatctttaataaaaatgactcgctctgcataagacgcatcgatatttgaatgagttaccattaaaatcgtctgttccaattgatgaatctcttgaaataacttcatcaatgcttttgatgttttagaatcaagtgcacctgtaggttcatcggctagtaaaatcgtcggtttagtaactaatgcacgtgcaatggcaatgcgttgcttctgaccccctgagatttcagaaggatatttgtttaagaatccctctaaatgtaattgtactgtcaactgatgtaccctttgttctatatcttttcgtttagcaccagctaaaattaatggcatcattatattttctttattcgtcattgttggtaaaagattaaaatcttgaaaaacaaaacctaccatttgttgacgatacaatgctttacttttatttttcatattatttaaatgtgcgccatccacaataatgtcaccttcagttaatccatcaaaagaagcaattaaatttagtagtgtagacttccctgacccagactcacccataattgcaacaaattcaccagctccaactgataaattcatttgattaagtgctgtcgtagcattcaaacctttaccgtaaaccttttttacatgtttaacttctagcaacatggcatgcacctcatttctttgttagttctatattaaaacaaaaaaatactaataacatttaaaatcgtgaaaaaatgttattagtatgcttacaatattgaaagtttttattcatctggaaattgaatcgtaaatgttgtaccctcattttgtttagatacgactgaaacaggatgattagtgtgatttgaaatttgctttacaataaataagccaatcccagttgaattactttgacgttgtccattataccccgaataacctttgtcgaatattttaggtaagtctccctcactaataccgattccattatcttttacgtataattgattggattgctcatcaaattcaatccatatatctttacctctcgcatacttaagtgcattatttattaattgttctatcattaaagaggtccatctaacgtcagttaatacttcgtgatgacaaggttcataatggatttttgttttttgatcaataaactgtattgaatatttcataataattgggcgaataatattgtttatcgaaattttagtgacagaaatatcagaagtttcatttaataactttaaataactaagtgctaaacttgtatagttatcaatttgaattacctcttgacgaacacgattcacaacattcggctcatctctttcaagtaacagttgtgctgcagtaatgggtgttttcatttgatgtacccatgttaaaaagtagctctctacatcatctttatattcaatttgttcatttttaagctgatacaacgcattttctaagttttcaatttgttgttgttggcttatagtttttacaaaacttaaatatttaatacctatgaatatgagtaataataataaaataacgccaagtgctagtaaatatgcttctaatggcaaatgatacaggtaaaacattaagccaaataaagcaaaaataactatgactattgctatttcctgagtaatacttttaagaaaggtcattacattcaccctatactttatatccgacatttttctttgtaatgataaaatcattaacgccaatagtatttaattttttacgcagacgcgtcatgttaacagctaatgtgttatcatctatgaagttttctgattcccaacatttttcaattaaagcagttctacttacatatttatcttcattttgaaataataactttaatatttgtaattcagtcaaagatagctgtatgttttgttcttgatacacgacttttgcttcatctaatattaatgtacaacctttaaccgtcatcgaatcattagctactgacaagtcataagttcgtctcaataatgcttgaattttggcaatcgttaatgacaagttaaatggtttttcgataaaatcatctccccccatttgtattgccataatttggtccatattatcaatacgggaactaataaatataattggcacattagatgtttttcggatttcttgacaccaatgaaaaccatttaacgttggcaaattaatatctagcaatacaagctgaggttgatgttggttaaagatagacagtatatcatcaaattgttcaacgacaataacaccgtaattccattttttaagttcagatgctaaactttctgctataacaaaatcatcttcaacaattaatattttcatctataatcttcttccttcaattgaattatcctttgtcatctttttgttctttagcctgctgcaatgacggctcttgaattgaactttccgtgtcatttgtattttgatttagtatatttgctttttctttctcgagttgctttttcttcgtacgtttacgttcttctaaaatagacaacactataaagaatatgattaataatggagataacattactagtatcatttttccacctcaaattatatttaattctatattttcacacgcttctattctaacgctttctataacaaattgtcatatatattcaatttttgttattctaaatcactctgtttacatatttttaactaaaactacataattgctcaaaattcctcttttacactgaagacatagtcatatactcaggaggatgtcttatgttatcagttaaaaaagccacaaaatttgcagttgctaaccttattatcgtgtcaacagtttttagttctgtcacacctgcaattgcgcaatccgataaaagttctaaagatgaaagtttcgcggttggtaatactaaaaatccaaaaaatgttatctttttagttggcgatggcatgggtccatcatttaacacagcttatcgttattataaaaatgatccgcatgctaaagaaatgacccctactgcttttgattcatatttaaaaggcacaaatcgtacatattcaaatgacccaaaacagaatattactgattctgcagctggcggaacagcctttagttctggtcataagacatataatggtgccatcggtgttgacagtaacaagcagaaagtaaagacggtgcttgaacgtgcaaaagaaaaaggtaagtcgactggtcttgtttcaacagctgaattaacagatgcaacaccagcagcatatgctgcacacgtgacttctagagatgataaaaacgaaatcgctaaacaattttataaagataaaatcaacggaaagcataaagttgatgttttattaggcggtggcgctaaatatttcggtaaaagtaatggcaatttagataaaaaattcaaaaaagatggttacgaccttgccacgaacagtaaggagttatcaaaatctgataaagataaagttcttggtttgtttgcagataaaaatatgccacttgcaatagatgcttctaaagacgaaccatcattagctgatatgcaacaaagtgcacttagtaagcttgagcgtaataaaaaaggtttctttttaatggtcgaaggtgcttctatagataaatcagcgcattctaacgatattacaggcgttatgtctgaaatggaaggttttgaaaaagcattcgatgacgccattcaatatgctaagaaacataaagatacacttgtcgttgcaacagcagatcactctactggtggtctaacaattggtaaagataaaggatacgaatggaatcctcaaccgattaaatcgatgaaacactctggatcatatatgacagaaaaaatggctaaaggtgaagaccctgaaaaagttattaatgaaggttatggctttgaattttcacaagatgatatgaaaaaggttaaaaaagagaataaaaagttgcaaaaattacttaaaaaaaataaagatgaaaaatctgcaaatgtagaaaaacaaacaaaagccttacaacacgcaattcagaagccagtaaatgataaatcttatacaggatggacttccgatggacatacaggcgaagatgttaatacctacgcttatggacctagatcagaatcatttagtggtaatatcgaaaatacagaaagcgcaaaaataatatttgatatattcaagtaaagcataaaaaaattcccgagcactacaacaaggtgttcgggaattttttatggtttaatttagtactcaatgttaggtgcttggttaacacgttcttggtattttttaaatgcgaagtataaaccgccaactaatgttaaaataactgctaattttttcatcattcaaactcctttctaagatgtgttgaaactgagttcaattaaattatatgtttttattatacacttttcgacatattttttaaatttaagaatgcgaagatttttaacatttctgatgctagctttctttttcatctttcaaatgcttaataaaatcaaaaccaggtcgccctttagccaatgcttccatcacatcataccaatccgaaccgacttgttgatatatattttgcaataattcatcttgcgccttgttcaattcagcaatgagttgatcgcctttatccgtcgaatataattttttgacacgtcgatcagtctctaaaactttttcaataatgagaccttgctcttttaatttttgaagtgttgcatgtgatccttgtttagaaatttctaatatttctagtaatgatttaatagtaataccaggtaatttattgataaaaaacaaaaaacgatgatgctgacggctcataccatacttctctataatttcatcagcggtagtaataaacgttttatatgcaaaataaaacaacatatgctcataatcgtttttattggtcgacatgatgatgactcctttcaaagcgttaacttcattataataaaatttataatgtaagtcatacaaatgatgataaaactataagctaaatctaagtttcacgagaaacattttttgtatcagcaaattgcgccaatcatattaatacaaaattaatttaaacactcagaaatgttagtcgtgcgtaaatagtttgtatcactctttgtatttaatgcagccacatattttccaagaaataattaatcattcaccatccatgttatagcacgcttaatcgcttggtcccaatatgcataatcatgatctcctggtccatcttcaaattgataaggaacatttttgcgtgataaataatcgataaaatctaagttgtcttgatataaaaagtcttgtttaccacacataatgagcaattttggaatttgtttatcttcagctacagctttgtctagcaagtaatacggatcatgttcagttcctttaacacttgaaacattgccaattatggcctcttttgaaaaatcattccactctagatccattaaattttgcgcttcaaacacagcagataatggtacagctttggcaaatttatccccttgtgttaatgcaaatttaattgtgccatatcctcccatagagtgacctgctataaaattgtcatcacgctttttggaaagtggaaatatttgatgaacataatcatatacttccaaaatataatcataatagctatgaccatatgccatgttagcatatgcgctatgatccacattgggcataatcacagctaatttgtgttcattcgcatacctttctatgcttgtatatctcatatatgtcgtttcatcacttgataatccatgtaacaacattaaagtttttaatggtttagcagttgtatcgttattaaagaagctttgatcttccggtaaaatgactgtcaaattttgatgcataccaattgttggtgaatgatagtttaatgaaatataagccatacgtcatgacccctttctaattctactttatcaacattttacgcttaaacaattcactttaaaatcattttcaacaaaaaaaccgaatacaaatgtattcggcctaaaaaagtatttacgctttttctttatgatcttgcttgcgttttctaaacaatagtaatgatcctaataatgccatcattgcaccaaataaagttgcatttgtgttttcgctcttatctcctgtttctggtaaagcatcagttttgtgttgttttgatgccttattagaatggtttacttcacctttaggatttgatggtgctttctgttcattatttggtggtgtaactcttgaatcggagtcgctatctgagtccgaatcgctgtctgagtctgagtcgctatctgaatccgaatcgctatctgaatctgactcactgtctgagtctgaatcgctgtctgaatccgaatcgctgtctgaatctgactcactgtctgagtccgaatcgctatctgaatccgaatcgctatctgaatctgagtcactgtctgagtctgaatcgctgtctgaatccgaatcgctgtctgaatctgactcactgtctgagtccgaatcgctatctgaatctgactcactgtctgagtctgaatcgctgtctgaatcggagtcgctgtctgaatccgaatcgctatctgaatctgagtcactgtctgagtctgaatcgctgtctgaatccgaatcgctatctgaatcggagtcactgtctgagtctgaatcgctgtctgaatccgaatcgctgtctgaatctgactcgctgtctgaatctgactcactgtctgagtccgaatcgctatctgaatctgactcactgtctgagtctgaatcgctgtctgaatcggagtcgctgtctgaatccgaatcgctgtctgaatctgactcactgtctgagtccgaatcgctatctgaatctgagtcactgtctgagtctgaatcgctgtctgaatccgaatcgctgtctgaatccgaatcgctatctgaatctgaatcgctgtcggagtcggagtcactatcggaatctgagtcgctatctgagtccgaatcgctatctgaatcggagtcactgtctgaatccgaatcgctgtctgaatctgactcactatctgagtctgaatcgctacctgagtctgaatcgctgtctgaatctgactcactatctgagtctgaatcgctacctgagtctgaatcgctgtctgaatctgaatccggatctgggtctgggcttggttctgggtctggacttggttctgggtctgggcttggctctggatctggcgttggttctggatctggcgttggctccggttctgggtctggacttggttctggatccggctttggctccggttctggctctgggtcaactggtggtcccggtgttggatcaactggatttactgctgaatcaccatcagcacttccgcctccataacgtacaacattctcattattccaaccgaaaatactgtaatctttacctgtcgctgggtcaatattttcttgaataacctgtgttttcaagtttttaccagtattatcataatgaccttcgactaaaacgacatacgttttatttatatcaccaaaattaatacttgctacgttatcgtatttgtatgaaattttatctttaaattgatcagttacttctttaaggttagagtcatttgggtctgcatagtagctatctgataatttagatgtatcattcacttcaaaaattctcagttttgtatctgtagcacttactttaccgctactttcttcgattttatcttggtaacctttaatatacacccacgtattacctaaaactcgttgcttagggttaacaaataccgtttgcttgtatgtgttttgacctgaagctgtatctacaccaataatttgagaagaaatgttcgcgccatttggcttatcaattcctgcaattggtgaactatagttataagtaattttattattaaacatttcatccgcaatattaatatttgcatcatatgttcctgatttaggtgcctttgctctgtctgtaaataatggtaatgaaaattgtccgttaatattttctttatcatttacataatctgtaaagacaaatgtatacgtcttagtcaagatatcatatgttgctttagctacaacatcgccattcgtacttttaatatctgcaattggcatcgtattattcgagttagagtaatccacatctccattaccagttacactatctggtaacttcgctgtaaaataatcccctgatttcactttccctgccactttaaaatttgccgccataaatgtgttaccactttggttagggtcaaatgtagtcttttctaacttgaaatcacttgccgtaacttgaccatttacatttgtacctttagcatcagcagcatttactacaggttcagtaactgcaagactacgtacagctctcgttctaacacttggtttactagttccttgcgcattggaaatcgtttgtggtgatgattgtggtaaatctaatgtttgaggatttttaagctcactgtttgttgctatgctattagcatcattcgttgttttattatctacttgagaatttgcttcttgaggaacagtttgatcttgcatttttgcagcagttgcttgatctttaattgccgtcgggtgaggtgtttcatttgttgaagctggctctgttgtagtggtattgctcgtttgtgtagacattggttttgctgtgctatctacattcgcactgtttgtgtttgcactaatatcagatgtatcattagccgttgtatttaattgaggtgtttctatcgtattgtttttttcggaatctgcacttgcattatttttcgaagattgcgttgtatcgttcgattgttctgaagcttgtgcttgatgattgcctatcccaaatagtatcgttgcccctactattactgatgtggtacctactgtaaaacgtctaatcgaatacttattctgcttattcgacaaataatcaattctttttttcaaaaatattactccatttcaatttctagattagtctaaattgtataatgaaataataattatatcaattgctttccgaaaaaaattacgtaaaatttgttttcttcctatttatataacttaaaattttctgttaactaacaaaaatcaatatactatttttacactattgcaaatgttttacttttcaaaacttagaagttctaaatttttcatcaccttaaactttactgtaatttcaacaatcaaatttaactaacattctaacttattcatcatgctagcaaaaaaggcctaacgtataaatgtacgttagacctcgtgttcaacttattcattttacattgtatattaaacacatatatcattgaataaatgtttgcttactaaccaatttttatgatctttaacaacaagtttttcatctttaagttcatgaataatatgaccagctgtttcccgggaaatcccagccatatcactcatgagttgaatagttaaaaactgtttgatttcataaaattcatcttgatcgtatcctactgtctgacatagatggcataacaatttgataattcgatctttagcaaatttacttgttaatgccatgttatagttcatgtgttgctgctcattatcatttattaatgcaaaaagtgtcaaaaatatatcatcattagctttgcacaaaaaggccatcaattctctaggcaatccaagaactgtacaatcggttaatgctgtacacaattcgttaacctctttcggatgaaacaagttactgattggaaataatacttgctctttattaaaataacgatatacatctccattttgattgtaatgttctctaataatgttaccttcaattaaaaagtaaatattgctactttcttgtggcgaaaaataaataacttggcctttcgtataatgtctgacaaaacattcactttgatatggttgtaatatactatatgggatattaatgtaatctgctaatgcctttagttcatgttctaatttattatttctacccaaaataaagttttctgtcataagttaaactccttcaaaccttgcaaagtgtcagcagacaactttttcatttgaatcaacggagaaacatatttaatgttttgtcgcgtgataaagtgctacatgtgaatgtgtgtacctttattaccaatcaaagcttcgtatgcctgctctaaattggtaatgataacttttttgttttccccactttcaacaaatcgtatcgcagcttctatttttggcaacatcgatccttccgcaaacttagcttgtgccgcgtattttttcagtgttgctacatcaatatcatcgatttgttgttgattaggttcattaaagttaataaatacattttctacattcgtaagaatcattaaggtatctgcttcaatcagcgttgctaatttctcactagcaaaatctttatctataaccgcttcaacaccttcataggtattttctttttttataactggaataccgccaccaccgcatgcaatgacaatatttttaccgtctgctaaagttcgaattaactggtgttctagtatagattgaggtagtggtgacgcaactacttttctataaccacgtcctgcatcttctttaaagactgagtctggctgttctttttgtaattcttcaacttcttctttcgtataaaaaggaccaattggtttggttgggttattgaatcgtggatcatctttatctacttccacacgtgttacgattgtgcctacagttctatcactattcatttcagttaaaatgcgattgatttcagtttccaaccaatagcctatcataccctgtgacattgcaccacaagtatccaatggcattgccggcgttgtgtcactgttcgatttagcttgttggattaataaacttccaatttgtggaccattaccatgtgaaatgacaatacgcgctggtgaatcaaataaaggtttaaggttttgcatcgcacgtctaatagctgtttgttgtgcttcagctgttgcttcttttgtctgtatcgcattaccgcctaatgcaatgacaattttctctttcatatttttgtcgctccttttaaaaaacatttatcgttcccatcaataacttaattaacccgataactgcaagtacgataataatcataaaaagaatatagtctgatttaatcaaacgtgtctgattattcttttgaacgattgaataaacaagaagagctggaatataaagtaacatcgtcaataataagtaattgatacctgctgcatatataagccatatagcataaattgaggctatgataccaatcgtccactgttttgtagttgcttgctgtcgatgctctaaagtgtattttacttggtaaaatgcactgaacatgtaagggtataaaatagcacttgatgctagtgaaaatgcaaattgatacgcactctgtgtaaatagcatacttattaaaaataattgtactaatatattggtaataagcagtgcatttacaggtgcgccatttttattttctttagcaaaccattttggaaataatccatcttttgcaacaatgaaaggtaattcaccagcaagcaatgtccatcctaaccatgcacctagtaccgaaataattaaaccaatatttacaagtgtagatccccaaccacctacaatagatgcaagcacctgtgccatacttggcgaatctaattgagaaatatgattttgcaaaatcacgccttgagctaatacagttaataagaaatagataattaaaactgatataagtcctataaccgtggcactacctacatcttttttatttttagctctgctagaaaaaattactgcaccttcgataccgataaacacccaaactgtcactagcatagtacttttaacttggctcattgtgctcgcccaactaaatggcaatacaccctctgacgtcataccgaaaaagcctgttttaaaagtgtcaaaattgaatgcaattatcatgcatatgattacaagtaaaatcggtattaactttgcaacagtaacaatactattgataaaggctgctgtttcaacaccttttaaaattaggaaatgcacaccccagagtagtaacgaggcgacaataatacttggtaatgtgttgcctcctttaaaaatcgggaaaaagttaccaactgctgacatcaatagtgttgcataggcaacattgcctaaaaatgctgagaaccaatatccccaagcactgataaagcctacaaaatcgccaaatcctgcttgagcataactataaataccaccgtctagctccggccgttcattggttaaattttgaaatacgaacgctaatgaaatcattcctatagctgtaataatccaaccaataataatggctaatccaccggctttaccgcccatatcagacattatattgaacgcaccgccaccaatcatggatcctataactagtccaattaaagaagatttactgagtttgttatctcctgattcgttcatattcatttctcctttaataccaatatgaggtgtctgtacttgatacttatatcatcagacacatcatattcatatcgttccatttagtgattaactccccaatgttgctgccattactgccttaattgtatgcattctattttcagcttgatcaaacacttttgaatattcacttctaaagatttggtctgtaacttccatttcagctaatccatatttttcataaatttcttgtccataaagtgtatttgtatcatggaatgctggtaaacaatgtaagaatatcgttgaatctttacctgttaaatcaaacatctgttgattcacttgatagtcttttaataaattaatacgtttttcaaattcactttcttcacccatcgatacccaaacatctgtatatatagcatctgtattttcaactgcttctgcaatattatccgtaatcatgactgaaccaccatattgactcgctttttcttttgcaatatcaacatatgcctctttgggatttaatgatttaggtgtacaaattcttacattaacacctaacatagcacctgctaccattaatgaatgcgcaatattattacgtccatctccaacgtaagttaagtttattccttctagatatccaaaattctcttttattgtcataaaatcagctaacatttgtgtaggatgccaatcgtctgttaatccattccacaccggtacaccagagaacttcgctaaatcttcaacagcttgttgtgaaaaaccacggaattcaataccatcgaacattctacctaatactttcgcagtatcctctacagattcttttttgcctaattgaatatcatttttccctaaaaattctggatgcgcacctaaatcaatagacgcaactgtaaacgctgcacgcgttctcgtcgaattcttttcgaatagtagtgcaatattttttccagataagtagtgatgcttaataccgtttttcttatactcttttaatgtaattgcaaaatcaataagtccttcgaattctgctttggtaaaatcactttcttttaataatgatctgccttttaaatcatacggtttttgaatttctgtcattattttcaccctcgcttctataatttattacgttaaatgtcttctctgaatagtggttgactcatacatctaggacccccacgtccacgcaccaactcgctaccagatatttcaatgactttaatacctttttgtctcaataaatcattcgatacatagtttctatcgtaagtcactacaacacctggtcttatacataatgtatttgagccatcattccattgctctctagcaccatcaatgacatcaccatttcctgttggaatgaattggatatcatctatacctagaacatcttctaaagtatcttttaaatgactagattgtttgatggcaatatctttatttacatcatcatattcaataataaatatattcatattgccttctgcctttaaaatggctgaatgcattgtaaatttgtcatagtctatcattgtaaatactgtatctaagtgcataaatgttcgactagttggaatttcaattgctactacttttttaaacgtcgcctgcggattttcaaaaatacgtcgcgctaacttttcaatagcttgtgcagatgtacgttctgaaacgcctatagccaagacatctttagataaaacaagttcatcgccgccttcaatattgaatgggcaatctcgatctaaccagattggaatattcgcatctttaaatctaggatgatgctttacaatatattgaataaatattgattctcgtcgtcgtgctctccagaacatccgattgattgttataccgtgtcctattgaggcttgtggatctctagtaaaataaaggtttggcattggatctaaatagaatggatacttatcatccatatactctactagatgtgtacatttcggattaatttcttccttacgtacccctgacattattttatctacaagttcttgattagaaagtgtcgcaaataatgccttaatttcttcttcatgacctaatattgtttttttagactctgctaatacatcatcaataaattcacttcttacttgaggattttcaatactttcagctgctaacttctcaaggtaaagtacttcaacaccctcttctcttagcacctgcgcaaaatggtcatgctctttttgagctacttctaaatatggaatatcatcaaatagtaatccatctaaataatcaggtactaaattttctaattcttttccaggacgcttaagtaacacagtttttaaagctccaatttcgctatttactttaattggaccatctgtcatgtctatttcctccttttatctttgaattcatttagagtatagacaatcttcaaacgcttacatgtgattatattcacataaagaaagtcgaaaatttcatatctttttgttatacaatacataataatggatttttatacataaataaaggtgttttgggtctaaatatacattttttattcaaaaagacccacaaaaacatgttgtataaagttttttatacagtcaaatgaatgactatgaattctttctttccataaaaaaacgcgtacacaagttaatatgtagtaactaacttgagtacacgtgatacgaaacaaatttttattattcatttgatacatgtctatttaaataattttgcatatacgtattctgccatatcatttgaggcagctaagattaatgtagtgtcatttccactcaccgtacctaatatctcttctatatttaattgatcgataaagtagttaatgccttgagcgaaacctggtgaggttttgactataatatatgcgccattgatgattgaacttagaacttcatgttcacaatagtgcctaaacttttctctcatctcttgttctgtttgattattaatagctttataaatccatgtctcacaatccatagggacacgatatatattaagttccttcaagtctttagcaattgttgttgcactatatcttacaccaaaatattcttcaatatatgaaatgatttgttcttttttataaatcttatgctttttaactattgtagaaacaatttctaatcgtttacttttcttcatattgtaaactcctttggtagttacgtttcttgtattaaaaaataaattcatgcatgtttcatttataatttaacactttgttttgcaaaagataataaaaatacatgtaaattttttgtgacaacttttaaaatgaattttgtattctaagtcagcatttaattatcacatatttactactagtaatgattttagactgccgagtagtctttcggcagacaaccctcacactcctctcatctaattacaaaaagagggtacacctacaaagtcaattatcaatgtaggtataccccttatataagctgtatttaaaatttaattatttataagtgtttaacattacttcttcttgtttatatatttttactccacgcctacttcattccatgcttcatacacctgttcagctgtttgctcgtcatataaatctttagccgcttggtataatgcatctttacaatctttgaagtttgaattacttgttaagtattctgttaatgctcggtagtaaatttgttctgatttagatttccctatttcttgaattacgttataagctgctttatttggaatgccagaattcgtatgcacgccaccgttatctttttcagtgtatacatagtctttcatatgagatggttgaccaaattgttctgggtttgacatgcttcgtaaagcatctccctcttttcctggtgtgtaaacatcttcacccatcaagaaatcctcatcatctacaaagtatccaaaaacatctgaaaagctttcatttaacgcaccagattgatctttatactctaaattcgccgtttcttgtgtcacgccatgtgttaactcatgtgctactacgtcatttgcacctgataaatttgtaaacgtgcggccatcgccatcaccataaatcattttgtctccaatccatgcagcgttatttctgttatcttgtccaccataatgatttacatgtgttaatgagactattggactaccatggttatcgtaagacctcacgaccaaatgtatttttgtagtaatcatatgtttgtttagcataataattcgcatctacaccagcacgttgatcatctttgacgaagttttcatcttcattagtaattaatgtcgcttgacctgtttgatcgttaaaattgtatgctgataatttaccttgatgcgtcaaatcctctaaactaaatccaccatcaatactattgatattgatatcttttgtatctccaagcacacctttacctgtgccagttgctgctgcttccttaactaagttcgttttttcaacaactgctcctgtgtcggcatcaattttgactttccaatgtgaaatttctggtgttactgtaattaattcaatattgtaaatgtatttattactgtcaccatcgatttcgactttattttctttgataacgtcatcttggaggtttttagctttatttttatcaatcttaactgcgttaaatgctttgtcagccgcttcatccttgcttaatgtcactttatttgtcggctttactttcttcgcatcagtatcaccgttgattaaaatgactttacccgatttgtccgcatgcactttcacttctttgtcaggcgcatgcacaccatccacactcggttgtaaggtgtaatgcgtgaatcctttcttatctgtttttacatctgtaacagagtaatcttgataatgatttttcacattttcagatttaggtaactcttttaatgctttaactgcatcactcttttgtgtgatttcaaaattaatatctgaagttgctggtttgtgattcgtatcactcgctagtgctgcaggtgtcaaagagctcagcaacgttactgttgccatacttgtaaatgcatatcttgaaaatttcctcacatttcattcctcctgaaattttaaaaacagcttataaataaaatattaatttaatttttcagaaaagtaaacgattatttctatttatttctatactttttgttcgttgattttatttattgattcttttcttttttaaaaatgttatctgtgactaaataaaattttgaaaattgcacttaattatcttttaaaatttatcaagtctttatttttgtgaaattattaacaatcaaaaaattagtacaatacatacttaatcaacatgtgaaatatatatgctgactacttaactgcgcatgattaaatctatatatttcaatatcatggagacacgaaaactaccatcatataatcaaaaaagactagtatgtgacatcattcctcacatactagcccctatatttactttattatttactcgttttgtatggcgtatgtcccactgtaacttcaaccactctattatgatcaacaacaaaccaaatgcctaatgactttttagaatgttgataataaaaaataccgctatcagattctttcgttttattattatcttttttcaaatctttaccataagctttttgaatatcttttagtgatatattatttttaacgataaattgtaattgattcgcttcatttccttttgcagttacacctttaaaagtttgatcgtatttctctactttttttgtcgcatttgtcttcgctaatttaatgccattaaatgtcacgttgtcatatttaatagcgttaataaaatgcttatccattataaaattagcgttatgaccgatatatccatgataagtatagtaaggtgttgttgccgcctgtgcttcttgatgtattggtgatgcagtccctacaactgttgcgccaattaaagtacctaatgctaatgtcgttgctgcacaaagtttagttgtttgattcatatttatctctcttttccatacaaatttttcaatcttattactattattataacttgcttgtacaataaaatactattgattatatttataaatatataacagttttgttatacttatttgaagtacataaaaaactgacacaaatattaatatcgtccgcatttcaagttttatagttaacatcattttatcgacattgaaagcatgatgccatgcaatgtatgactatttttattataggaggcgttacatttgaaaaaatttcttattactgttgttatcatcttgttaattggtgcacttggattcgccatttatgctgcaataaatcattctacatcatcaattcataataatgagcaagataataaagctacccatcaaaagaaagatactgaagtaaatcatcaaaaagacgagaatacaaacaacacaaatgaaaatcaaaacaacaacaacggtgttactaatggcaatcaatcatctacgccatcaactgtccaaaataacggttcaacagcaccagcgaatacacaaccatctaatccgaatcaatcaaattcaaatcaatcaaattcaaatcaatcaagttcaaatcacggcggtagcagtcaaccttcaacgaataaccaaaatcataaacaacagaacacaccggccccaaacaaatctaataatgctaatacaaacgagtcttctaagcaggtatcaccatcacaaccgcaatcatctaaaaattaatcatttacctgatacgtccacaagtatcaggtacataaattcagaaaaacagcaatgagatatttttctatttgaaatatcttactgctgttctttatttgcataattctcactctgttaaattcatataaaagttcgctttaatgtcattgacgtatgcataagctctcatgtttaataatattaatacacatttaaaaacgcttacacgaaaaatttagaaaggaggtacatgttaaatgcttgatagacacttaaaactactccagttttttattaaaaacccatcaaagcacattagttctaatgaaattgctgaacatgtcaatgtttcaaaccgcacagttcgcaatgatatccatgttatcaatagtaattttatggatgatatcatcgtaagtattaaatctaaaggatatcaattaaatacatcgcagtataccttagaaacgataactgaacgttacacgcatattcaatcatataaagaaaaactattattatctatggcgtatcaactgctaatgcacaataaatcacagacattgcaacaactagagcaagattatctattatctaaaactgtgctcaacgactatttcgttcgaattcaacaatggtgtcaaaaatttaatatcgctttaacaattaagaaaaaacaaggtattgtggtcgatggaacagataatgatatcactaatgccatcatccatttaaatcaattatcatcagggcatgtacatgttgaagacctaattttaaatgaattacctgattcacaccaaaggatgatgtcgcatattatacaagagacacttcaacaacatagtattgaaacaactgatattcaaatacaacagcttttaattcatctcattttaatcattaaacgtaagcaatctttaagtgaactagacacgttaaaccacgatgcaaaattgatatctcaatcttgcattaagcaaatcaacgaaagattaggttatgacttgaacgaaaaagtaatcaatatgttttcattctttattgcttatcattttaataaactcgatattggcatagaacgtatatttatacaaagttatattgatcgcttaatcgaattgatgcagcaacgtattcatgtacctttcaatgaagattcgattttacaacaaaatttatataatcattttagtaaagcatatttacgtatcactcaaaacatttatttaaacaatcctttagttatagagattaaaaaactctatccctttgtgtttaacacactttttgaagcgattgataaattagcaattgatactgatatagagatgagcgaagatgaaattgcctttttaacaattcattttcaagctgccatcgagcgtcgtaccaaaacacaattaaatgtagtcattgcttgttattatggtctaggtgtgtcgaattttttagaaactaaaataaataacttgtccgaagagttgtcagtgataaatacgattaaactagaaaatataacacactatcactttgacaatgtagatttattaataacgacccatgatattccaaaacaaacgctaaacatacttcctaagcacctaacgactatcaaggttgcaccattattttctgaggatgaccgtcacaaaatcatacacgttgtgaagcaaaaacaaaatccggttcaagcacatcatcatatggacactgtcaatttccttgtcgtaaatactgaacaaaaaccacgacatacagtgcaaatttttgaagaagctcaaaaaatattacaagcacatcatgcgattgtagaaggatatatcgaatcagctttagagcgtgagaaatcatcttctacatacataggtaattttatggcgattcctcatggagatcctgaaaaagttttacaatcacatgtgcttatttttcgcacaaaagatgtttttccttggcgacaacacgatgtcaaacttgtctttttcttagcgatttcgcataaagacaaagcttttacaaaacaaatgatgcaattaattgctaacttggatgatgattcagtgaaccatttatgtagtttagatgatcatagtttaaagcaacagttatttgaatacttacaagaataattgccactagtaacggtaattattcttttttttagtaacgagaatacgcttacaatatagaaaaggagatgattttatgaaaattgtagctattacctcatgcccaaatggcattgcacatacatatatggctcaagaaaaacttgagcaggtagcaaaagaaatgggtgtggatattaaagtagagacacagggcggtgttggtgctgaaaatgttttaactacgcaagacatcgaagaagctgacggcgtcataattgcagctgataaacaagttgatctgtccagatttgttggtaaacggttgattaatgaaaatgttcgcgaagggattcataatccgagaggtctaattcaacgtatcattaatcaagatgcgcctatttatcaatctgaaacaaattatcattcgaaagatccgggtaagtctaaaagtggtattcaaatggtgtatcaacatttaatgaacggtgtatcgtttatggttccttttatcgtagttggtggactccttatcgccatcgcgctgactctaggcggtgaaacgacatcaaaaggattagtcatcccagatgattcattttggaaatccattgaaaacattggtagtttggcctttaaatttatggtcccaatactagctggatatatcgctgttagtatcgctgacaagcccggtcttgttcctggtatgattggcggcgctatcgctgctgacggtagtttttatggcagtgatgcaggtgcaggatttttaggtggtattgttgctggtttcttagcaggttatatcgcaaagtggattaaagatattaaagttccaaaagcgatggcaccaattatgcctatcattattattcccattatttcatcggtcgttgtaggattgatatttatatttttaatcggtgcaccaatttctaatatttttgagacattaacaacctggttaaaaagtatgcaaggtgctaatattattatacttgcgatgattataggtgcgatgatcgccttcgatatgggcggtccagtaaacaaagtagcatttttatttggttcagcactgattgctgaaggaaattatgctgttatgggaatggtagccgtagctgtatgtataccacccatcggtcttggtttagcaacgtttgttcaaaagtataaattcaatcattccgaaagagaaatgggtaaggcttccttcactatgggactatttggtattactgaaggtgctattcctttcgcagcgcaagatccattgcgcattatacctgcaaacatcattggtgcaatgattgcatcagtcattgcagccattggtggtgtcggcgatagagtcgcacatggaggtccaatcgtggctgtattaggtggtattgatcatatattatggtttatcttagcagtgattgtcggtagtcttgtcacaatgattactgtactaatattaaaacgtcgcacaccagttatagcagtagatgcaccagcgcaacacacgcaacttcatgctacagatataacacaacatgatacagaggttgacaatgtagataacaccgcgaaacattcacatctcaataaaccttctcatgtgtttgatcaacaaactatcattattgctaatcagaacatgtctcgaaacgaagcaatcgatacgttgattcatcaacttaaagtgtgccgttatgtagagcacacatcgcatttaaaaaatgcaatcctagaacgtgaaatggagtctacgacagctattggcatgaacgtggccattccacatgcaaagtctgatgttgtaaaacaaccgattgtagctgttatgaaaaataatcatggtgttaaatgggaaagtctagatggtagtctacctcaattgattttcttaattgccgtaccaaacaacagtcaggatacacatttaaaaatacttcagcgcttatctaaagcgttaatgaatgatgagacgcgccaatcactaattaatgcaaacagtactacagaaatttataacttattaatgaaaatatagaggagttttaactatggcattatttttacaacccgtttttaaagacagaatttggggcggtcatgcattaaaagcatttaactatgatatccctaatgaaacaactggtgaatgctgggcaatttctgcacatccaaatggccctaatacaattatcaatggtccatacaaggatatgaccctagatcaactttggtcacaacatcgtgaattattcgataatgattcacgagatagtttccctctgctaactaaagtattagatgccaatgataaattatctgttcaagttcatccggatgatgattacgctttaaaacacgaaggcgaactaggtaaaacagaatgttggtatatattagatgcagccccaggtgctgaaattatatatggcgtacatgcacataataaacaaacgttaatcgacatgattgataatcatgaatttgacagtcttttcaaacgtatacctgttaagcccggtgacttttattatgttcctgctggcactgtccatgccattggttcgggtattttaattttagagacacaacaatcatccgatacgacataccgtatttatgactatgatagacgagatcaaaatggtcaattgcgtgatttgcacttagagcaaagtaaagatgtgattgaattaggcaatcatgaaccaaatactactcctataacaactcacatcgacacacacactgtaactcaatttgtagataatcaatattttgcagtatataaatgggatattcatggagatttaaaattcaataaaccacatgcttattgcttagttacaattatcgatggtactggcactttagcagtatacgataagcactatgacatccaaaaaggttctagctttattttaactacggaagacgaggatattcaccttgtcggtaatattagtgctatagtaagtcatcctggataatagcaatggtaacacctgtcccataaaagacagaaattactatctcttctgtctaaaaacataaaaatccacacattaaggtgatagaaccctagtgtgtggatttcatttttattctgtaacgttactttggtcaactttttcagatacgcgcttcatcaatggatctgttacaggttttaaaattaaacctacaacgaagaatcctatgccaaataacgttaatataattaattttgtaattaagatttccggaacaataccgcctactgtttcacgtaatgaatcaatggcatacgtaaatggtaagtatggtgaaatgttttggaaaaattgtggtgtcgtttgaattgggaatgtacccccaccacctgcaatttgtaatacaagcaatacgattgcaatggctttacctgggttaccaagtaatgatacgcacgtatatacgattgagttgaaaataatcgaacagaaaatcgttataagtacgaataatacaggtgactcaactcctgcttttaggattaacaaatctccaaccgatacaatgagtgcttgcaacataccaagcattataaagaatcctgctttacctaagaatacttgtcttgtcgttaacactggctctaagctcttatgtttattatcaaccgttaataaacttaccatcaagagtgcacctacccataccgataatgcagtatagaatggtgtcatccctgatccataatccttaactgggaaaacatcaacagtcttcttattaataggatttgcaataatacccgcttgctttttcaaatcattcttaagtgtgtcgattaatttatcgactgcatcgtctttgtctaacttcttgaaaatcttattcgcttttttcagatctttttcaacatctggcaatttattttgtgcaaaatcagctaaatctgataaagcctttttcgcttgtggctgatttttatttagtaatcctaccgcttgatcataaccatttaataacgttggtaaatttttattcacacttgcagtcgcattggttaatcgctgttccaactgtggtaagtcattgcgcacaaagttagcagctttcgctacatcacttttcactttcgggaagtttgcttgagcatttttaatagcactaatgtattgttgttcaatacttggtaatactgtttgcaagcgatcaatacgtgttttaccattttttaaaatagattgaccactgttgatgacttgatcaattgtatttagcttagactgaacattagacaatgccgtttgccctttgttcaattcatccataatacgttgtgatattgatactaaagagctgttaagatcttttttaacataatctctaaatgatgataatgatgaatctagttttgacagttgatctagtaatttagtggcttcagcagttcctgaactaccattctttaatgcattgcttaattgattaactaaccttaatgattcattaattcgattattagctgcctttaccttatcaatttcttttgataaatcaacattttcattcttctcaatctcttttaatgtatcgataaattgctgattatattgagttgtgtattctaaaccggacttaacattatctaaagactctctaaaatcagaaggcttgtccgatgctaaaatgccatacgaaatattacgtaatgcctgactatctttttgtgcggctttcgcttgggtatctaaattatttgataatgataataaagagcccgttaatgccgcttccattgatttaacatctttatctgtaatattttgtgtgttctcgttagctgtgctgacttgtgttgttgttatatctgcaaaactttgaccatcttttttcccgcttgtactttgtggtgtagttgatacaggcgcattattactatttggtgcggtattttgcgtaacattattatttggtgcagtattgccatttggtgcacttggtggcgttgatgctacaccattaccagctgcaggtgcactatttgatgtttcgttgttcgccgcgctattttgaggaatctgttgctggtttcttcgattcaaatcttgcgcgcgtcgaattgcttcttgataatcaccgactctacttctaatttgtgtgacgaagcctttggcatcatttaactgtccattagcttgatcaataccttgactcgcaatgttaagtccttgattaattttagggaactgcgctggcacgtcatcagctgcaaaatttaacgctttttcaattttcggcatataattatttaaagctaatatcaacttagccttttcattaagttgcggaatagcaccattgacttcgtttaattttttctgagcatctaaaatatcacctttataatttcctagttttctaaaatcattcgcatatttatctaaatccgcttggtggttattcaaatatacaattttattcgcaaagtcattaatcttaggtaaagctttatctgctgaatataccgcattttttatcttattaattgtcggcacattttcttcaatagttaaacctgctttgttagcttcttctaataatgctcgagttactgttttattaaattgttcattcgctttttcaacgacaactgacgaaccagtatctgttagcttagacgcaacagcgttaatcttctgattcaccttaaattctacatctgctttttgaggctgcttacgtagtgttccggtaatttcatgtgtaaacttagatgggatgtaaatacccgcaaaatatttacccatttttatctcatgatcagctttctctctacttacaaactgccaatcaaaacttttatttttcttgagtgtattaaccatcgtattaccgacattaacttttttccctctgattgtgtcgcctttatcttcattaacgactgcgaccttgatgtgtcccgtgttgccatatggatcccacattgcccataagttaaaccaagcgtagaacgatggcaaaatagctaagcctgctaagataatccacacagctggcgtcttagctactttcttcagatccattttaaataatttaaatgcgttcttcattgtcacactcctatgtaggaattattcatattttttatatattttttgtaaattaatttatttttgcgttgtaaattagtataatcaatttactggaagatatttagtcgattgatacctatcaactattttcagcatacgataaattataacaaatcatagtttattatcacacttaattattatatttttcaagggagaatacgaaatatgcctaaaaataaaattttaatttatttgctatcaactacgctcgtattgcctactttagtttcacctaccgcttatgctgacacacctcaaaaagatactacagctaagacaacatctcatgattccaaaaaatctactgatgatgaaacttctaaggatactacaagtaaagatactgataaagcagacaacaataatactagtaaccaagacaataaagacaaaaaagttaaaactatagacgacagcacttcagactctaacaatatcattgattttatttataagaatttaccacaaaccaatataaaccaattgctaaccaaaaataaatacgatgataattactcattaacaactttaatccaaaacttattcaatttaaattcggatatttctgattacgaacaacctcgtaatggtgaaaagtcaacaaatgattcgaataaaaacagtgataatagcatcaaaaatgatactgatacgcaatcatctaaacaagataaagcagacaatcaaaaagcacctaaatcaaacaatacaaaaccaagtacatctaataagcaaccaaattcgccaaagccaacacaaccaaatcaatcaaatagtcaaccagcaagtgacgataaagcaaatcaaaaatcttcatcgaaagataatcaatcaatgtcagattcggctttagactctattttggatcaatacagtgaagatgcaaagaaaacacaaaaagattacgcatctcaatctaaaaaagacaaaaatgaaaaatctaatacaaagaatccacagttaccaacacaagatgaattgaaacataaatctaaacctgctcaatcattcaataacgatgttaatcaaaaggatacacgtgcaacatcattattcgaaacagaccctagtatatctaacagtgatgatagtggacaatttaacgttgttgactcaaaagatacacgtcaatttgtaaaatcaattgctaaagatgcacatcgcattggtcaagatagcgatatttatgcgtctgtcatgattgcccaagcaatcttagaatctgactcaggtcgcagtgctttagctaagtcaccaaaccataatttattcggtatcaaaggtgcttttgaagggaattctgttccttttaacacattagaagctgatggtaatcaattgtatagtattaatgctggattccgaaaatatccaagcacgaaagaatcactaaaagattactctgaccttattaaaaatggtattgatggcaatcgaacaatttataaaccaacatggaaatcggaagccgattcttataaagatgcaacatcacacttatctaaaacatatgctacagatccaaactatgctaagaaattaaacagtattattaaacactatcaattaactcagtttgacgatgaacgcatgccagatttagataaatatgaacgttctatcaaggattatgatgattcatcagatgaattcaaacctttccgtgaggtatctgatagtatgccatatccacatggccaatgtacttggtacgtatataaccgtatgaaacaatttggtacatctatctcaggcgatttaggtgatgcacataattggaataatcgagctcaataccgtgattatcaagtaagtcatacaccaaaacgtcatgctgctgttgtatttgaggctggacaatttggtgcagatcaacattacggtcatgtagcatttgttgaaaaagttaacagtgatggttctatcgttatttcagaatccaatgttaaaggattaggtatcatttctcatagaactatcaatgcagctgccgctgaagaattatcatatattacaggtaaataagtattatattaaaccagtaaaatttataagtataaacaaggagttcagacttaaacatatttctgttcataagtccgatttcttattcaattaaacccgaggcattcagttcgaacgcctcgggtcattttatataagtatattattttatgttcaaatgttcctcatcatatccgtttcaattgccatctcacacattttataaatatgagcaaatgtacttattctcaaacattactgccgagctttaattgacgttatattaactataaactacttttccatgactctacggattcaatgtcacatgagcgtgataaaatttgttcaataataaagtcatgtttatcatctgatctatcaccaacagcatcttctaaaacagtaatataatagtctttatctacactttctaatgccgtgctcaatacagcgccacttgtagagacacctgttaatactaaatgattaatatcatttgcacgtaaataaacttccaagtaactacctgtaaatgcgctaaagcgtcgcttagaaataatcggctcatcttctagtggtgctaagtcttcaagtattcgtgtagatgcatctgcttcagtaatcgcatatccttgagctttaattgttgaaaacactttattactcgaggagacatcattaaaatgcttatctaacactaaacgtatgaaaatgactggtattcgatgttgtcttgctgcttcaattgctctctgattcgctttaataatattttttattctaggtatactactcgctataccttcttgcatatccaaaactaatagcgccgtttttcgagacatcttcattctcctttacttgtgtagttctaagtcgttaaattcattataacgttaaaatgatggacaatctattcattgcattttgcatatacttcacaataatttaagggggaataagacgtcttatatactttaaaaatatatagatgctctccccccaatataattatgctttatttttcaacttattgcgtcgtgataaccaaaccattagtacacccattgcaccaacaattacagatatcggcaaccaatgttcttttatcgtttcccccgctttaggcaaagatatattaccatcagcatttaataatccacttaataatccattacctttaccaagtgttaacgtcttttctggctttggtgtgggtatatctggaatactgtctaataaatttgatccttgattcattaaatttgctaacttatttaaatctgttgttttcccatttttattcaatcgatctagtaaacttggacgatttactattggtgataaaatatagtctatatcttttttcgtttgattgagtctcttttgtaaattcaataaatcatccgctttaccattcaatgccgatttaactaaattaaaaattttattttgatctgtttctattttagtaattaaatctgccagtaattttgccttttgtctttctatacgtgttgctaaaatcgtttcaattgcttgttttttatctttggcattattcaaaattgcttttaatatatcatctgaagacgtgtcaccagttgatgcaaaatgtttcttcaattggtcaacgatttgacgatttgataatcctttattcgtccaatctttagccaatttatctgcttcagcttttcctaatttcgtttgtaaaatttgagaaatcaatagcgacttatcttgtgattgatcaatcaatgacgttaataaatcatcactcgttgtcagagatagttgatcaatatgacgagtaatttgatctgcaatttgttgatctgttttaccatcaacacgtatatcttttagaattttatctgcctcgtctttattaaatatactttctaaaatgcgttgtgtagcatgctttttatcatcagtacgtgcaagttcttccaaaataatatttcgttgactttttatacgctctttcgtcttatttacttcgctcattaagtctgatttttgatttttaggaagttgcgtatttgcaatacgttgatctaaagattgtaacgtattcagtttatgatatgtgtaatgttgcgttgaggcattacttttagccaatttttcaatcatagcatgattaattttatcgcttccttgtaatttatcagtgagtcgattactatggctttgattctcttcatttgaaagaaatttatttaacacaccatgtccagaatcatcattatttggcgttttagccacttcatgattattatctgttgtagacacttctggatctttcgatgtatctttcgatttgcgtatttgttgactcaaatggtctaagtcttctaacgcattatctaccattgcttcatcatttttattatctttttctccatgttttgttgcagccgtttgtgacatatcatttttcattgcattaagatcgtcctcgtcactttgttgacccctatcaacctttgaagaaacctcatttaaatctttaagcaattgatctaatttactgtctatatcactttgaccgttcatttcaatgtgagaacctttattgtctttgctatccaactcattagctcgttttatgatttcatctatttgcgatgctgttttcgcttcatttagttgtgctttataatgtgctttagatgaagccgataactgttttaattgctcaatttgacgatttgctttgtcaactttgtctaataaatcttgcttagataatatctcttttgaaatttcagtatccttttcagatacagcttgggcatcgtacggcaagatattcgttaaaatgatactagtcgccatcattgtcgaacacgataactttacatataatcgaaacggtttccctcgatatttagccatcaacttactcctttctcacttacttccttcaaagaattacatactattatatacctatttacaagaaatttacacttatctatctagttattgttgttagtaattatctacttattactcagcttatatttaagtaaacaaaacaagcatgacgtaatatcatattgtccatgtcgctaacatcatattacgtcaaatcttttatattaaatgatgttttattttagactgctttttctttttagctttcgagcgcctgtttaaaaacttgctcaaattgttcacgcgagatttcgtgtgcatgtgctttttgtgctaataaagcatctcgaaactgttgttgatctttcaaactttctaacatttgtattaattggtctttactttccattgttatctcatcattatgctcaaataagtgctctgatagcgttactttagcatggtgtgctgtttgacgataacctaaaatcaacaactcatagtcaaacgcttgttccaccgcatttaaaatttcattaccttcattgatatcaagataaatatcacataactggtatagttcatttaccctgtctatattaatagatgggtataagtgcacattagcatattgatcaagttgcattagcttatcagacatctctgtaatagcagcgatgtgaaacttaaaatctggtaaagtttcaaccaataccttgatgttacaaagttgatccgagttagttaatattgcaatttcttttgtaaatctattacgactacgataattatatagatacccaccttgtaaaatacgagattgaacctttgcgtctgctatattgagcatcatttcatattcgtttttatctggaataataatattacaatgtcgtttcatatcacctttacacatcaattgcatatttcctgggacattaccatcgcactgttcttgccataccaaaacatcactaccatttgatggcaaattatataacactgaaaatggtagggctagtgagttaataacgaaatgatgttccgtaatttcaagttgcttgataaaaaataatacgaatgcgagctttgaagggaaaaagtaagacttcccttgccaatccaatatgacatcagatgttacaaaattttcataaatcacttctttaccttctgctgtcaaatatttcttcaagatcgctttacgatttaaatcgtaaacagtttgtgcaaatttaataccattcttagaataataatcgacaaatcggacacgttgttggtcatcaaaccattcgacacgactaacaattctagggcgctctccactttgataaaatattttgcctcgtagacgtcccatatcattaattgtagccgaattgttgttacctttaatttcccaaaaagttggtacagtaacctgattaaagaatcgtggtttcatattttctgaattatgattatctgcaaaaaattgatacggtgatataacatcgtccggtaaaaagccattgtcattgagtacaattgttaaatcttcctccaacttactagctttaaaagactcatataactttcgtgaatgatcgttaaagtaatcaaataatttaatcatgcagcacctcttgaactaatgtttcccattttaaaataatatcttgagtcataaattgttgtgccacttcataagagatatcatgtggtgtctggggtccattgttaaaatacattacaatggcatgagctagttttgtgacaacatcatccacactatcttcatcggtatcaaaaggtaccaagtagccattttccccatttcgaataaaggttgggttaccataattcacatttaatccaatcatacctagtcctgagcctaccgcttccattagtgttaacccaaaaccttcgctagttgatgcagaaagaaataactcataatcagtataaatttcatcaagtttaacatgccctagtaaacgaatataatcttgcgcgcggtgtgtatcaataattttacgcagtcgcgtcttctcgctaccttctccataaatatcaaatgttaattctggcacttgtcgtttagccacgataactgctttgacaagccaatcaatatgtttctcatttgctaaacgagatgcactaatcatcgcatatgactttcttgataatgttggatatgataatgcatcaatgcttcccacaggaatagtataaacacgtgggcgataaccttgatattgctcaaattgtcgacaaaccatatgattttgaatatctgttgctgtaataaagaaatcaatgtatttagcttttgaaaattgatattcataataattgttccatagtatatgctgctcgctcatcatattattactataatgatcagcatgaatcacaacaccaactttactatcacctttatgctgcaaaacagcctgaccaatatcagaagcgcggtctaatatgacaatatcgtctcgggttaaattcaatcgttgtaaaaagtatgcaataaattccgttttgttatacaacaccgcatctgcaaacacatatatagagctgtctccatcaatatattcgttataagcgatggaaccattttcattatagaattgtcgcatatataatttcgctttattatcagctggtgcataatactcagaaaatatgcgtgtataactataaaaatctttacgtactaacatactattaattacaaattctgcacgatccacaatgtctttttgttcattttgcagataacatgttacaaatgatgatttcccattaaaatataggcggactatcttaccatttctttctctaaaactaatatcatgaccaagctcacgttcaatgtcatctaacgtgtacgttgttggtgctatagaaatatcactaaaatactgatacaaccaaataacttcttgatcttcaaacccaatgttttgcgttaatgtctgtatgttctctgactgtataaaatctaaaaacacaaatttagtgtcttgatttgtacgtctcaataatttagcacggtaagcttgtgcatattcaacaccgctactcgcccagcctataccaaagtttatattatatattgtcatgcgctaccccttttcatttatggaaaatgtataactggcataccttctttatcaaatgtaatcatgctttgacaaatatttttcaccattctttttttgatatttcgtgtcataacttcaaatgaatctaatgcaactctatggtattcaaaaatagcgttacgttgcccattttgtcgttgattaacgcttgcttttaattgttgtaaatagtcgacttgttctaaccaacatgaatcaattgctttcaaaaagactttttgaacgaaaatattataataatatgcactttgcatgtttttacgattcaaagctacttgcttttcaaattgctctaataaaaatgtcactactgcttgcttatctttaaaattaacacaagccacatctttattaaattggaaacttaaattttgataaatatactcgacaacacgcgattttgttagcaccttttcctcatttacaaacatttcaaacacatctttagctaacgctttaaaatctcgattctcagcatcatctatttctaaaactcgattgcgttcctcgtatacaagatctcgctgtatactaatgcttttttcaaattcattagccatttcacgagctttaaccccttgttcttccgagatacgttgcgctttaactacaatttgcttaactttgcgattaaacaaactactttgcgataatagttgtgcatctaatgaatataattgattattttccgctaaattactatcgctccatcgcttaactaaataatcatctagtgaaatatatatacaagatgatcctggatccccttgtctaccagaacgaccacgtaattgcctgtctacacggctattttccatatgttcatgaataataacagctaatccacctaatgcttcgacaccttcaccaagtttaatatctgtgcctcgacctgccatactagtcgcaacagtcatggaaccaatttgccctgcttcagctatcatctgcgcttcttttgcaacattttgcgcaatgagtaaattattaggaatatccatttggaaaaatacttttgaaaagtattcagccgcttcagcagttctcgttatgagtaaaaccggtcgccccgtttcatgaagttcaactatatcatgaatcattgcgatgtttttctcatcaactgaacgaaacactttatctggttcatcgatacgttgaatcgctttatcagttggtacttgtacgactatttttgaatacaaatcaaagaactctgattcgcctaattttcctgtagctgtcatacctgaaaatgattcaaaaagtttaaataaattctggaaggtgattgttgccataacacttttatctgttgaaacctccataccttctttcgcttcaatagcttggtgaagtccagcttgcaacttagttccaggtaacatacgacctgtaatacggtcaattaaaacaatatcaccattatatacaaagtaatcgacattagattcaaacaaatattgcgcgcgcagtgctagattaatattacgcactaggaccatcgcttgttcgctatataaatcttcaacattaaagtatgattgtgccgcttcaataccttgatttaacagccatatttcttttttggtcttcttcattttaaaatgcacgtcttcaatcaatgtatctacaaactctttcacaatatgaaatagatttgattgtaatcttggtgcacccgaaataactaatggtgtttgagcagcatctaaaatgattgaatccacttcatcaataataccgtaatttaattgtggtaaaaatttcccttccgcactatctgccaaattatcaattaaataatcaaaaccgagacgtccattagttgtatatataatatcatgttcatatatattacgtttttcccctttttgatactcataatccacaatatcaacaaaacctaatgaagcagttaaacctagccattcatataatggttgcatctcttcaaaatcacgcttcgctaaataatcattcgttgtaattaaatatgttccttttcccgaaagtgcatttaaatataaaggcatcgttgctgttaatgttttaccttcgcctgtttgcatctccgcaatattaccttcatgcagtacaatcgctccgattaactgaacttctttaggatacatacctaatactctccagctcgcttcacgtgccactgcataagcttcaggtaataatgtatctagtgtatcaactcctgatgctaaacgttctttaaattctattgtcttttgttttaacgcatcatcagaatatgatttaacttcatcgctccatgtattgatgcgtttcactatttttctaatcgactttagccttaattcgtttatcgtaacatctagtttatgtttcatttacttccccaccattcagtttcgatacatctaagtaatctaaaaatcgtactggattcattaaacgtgacatatagtttagatggttgtcttgctcttctttaaaataaacctcgacatttgtatcttttaattcatgatttcctgggacatgttctgtaaaccattcttttaaatcatcatcttcatggcttgtacgatacactttgcaatccaaatgctgagcgacataagttgcaaaaacatttgactttgacccataactaatcaaattaatagccgttagggtatcttgactttgcaaatcattctttagttgcttaatattttcctcgatattgtcgtccatccaacgttcaacgagccaaacatgaccaaacgatttcaaaaaatcattcgaaatagttggataggtgtcagatggttctgcaataatgacattgaccctatcatttccatattggtcatcgcctatcttcgtcacccgcatgcttttatactctaaatcatcttgatgcgtcatctctgtaattgttaaacatctaaatataaggctcgtcgatgctgcattcatcatttttattttataagcataggcttcatcaggatattgaatcgtaatactatttgactttacaatctcagtacttagttttgtgccatttttattataaaaaatgatgataaaatacactgaaccagcaggcgttgcatcaaaatcaaaatgcaatttataatgctgtcctctacgcaaaattggtaaacttggcgcacttttatattttgaaaattgttttaacatcaaccactcatgaatcggtaatccagagggcatcaaaggatttataaaagtcacttcaccatttgaaaatgatacttttgagccatacataaatgtagtttgtgaaatataattccaagtaactttaaatgttttgtttttcagcatgttgaactctcccaaacttgtcttccaaaataatgttgtaaaaattaacaaaccaacttgcaatggtaggtgaatcatcattatgtcgcccaggaatactgcgattcatcactcttgcttggtgtgctgtcaatacaggtagtagctcttgaaatgcatgtggatcataatcatcatgttgcatatatgctatggcaaaaacagtttgtgacaatgatttcttttgaaatgtttgccaaaatttttgatttaatgcctgtatcgacgcttgagaagtatcaccttcattagacaccaggacgtctaatgctgtaccgaactcttctggtctaagtaatcgcatatgttcagcaatcgttccaatattaacaagtggtttaccaacaataattgcctgaggatttaattgagcaccataatacaaggcaccaaatgaacccatagataaaccagataatattaattcatgtgatttaaaattcagcttttctaatgtctcgtcaataacattgataataccttgttcatattcagatgaaccgatataaaagctaccaccttcaacacgaggatcgccgattagtaaaaacggtgcattcatacgtttcatcatataatacccttcgaaaccttccgctgttcgataaccactaaaatatacgtttagtggtggtttcatatcaccagggtggaaataataaataaattcctgtcgttgactatctacgaaacgactaccaccgagtaaaaattgacccatgtctaatctagaccatcgtttgtgtataggtcctaaatgtaccgtcccgttccctcgcgccttaacagtcacacttatataagcatcaaatggtttcgtaggtatctctaaaggactgtctaacatatcatcagttaatatgatttgctcaattaatgcaccatcagcgccagtttgaatcaatctaaatgtatattgcaactcgaccgcaccatcagtatcaaattctggccatatttgaataactttatctttatcgtaaacgagattattttgccaagatgcgataggtttaaattcttttccaaattctccactcaacgtgagctctgaattaccttggtaaaagacatctcctttaaaattcggatgaacaagtgctaacttaggagaaaccttatctccatactgtcctgagaagctaactgcctctaatttattattacgttcttcaatgttccggtaatgtaatggttgaacaacatatttttggacattttcgtcttgttcatattcaacagaccaaaatgattcatcaacatacgtattgtaaggttcgcttatcatttgtaataaattcgttaatgtctccgagtatggtgcttgaatatagataaaatcaaagtgtccttctgcttcaacaatcgcttcaatagcctctacataaccactatcaaattcaaacaatccaatatcgaagtaatcccaactcacaccttttttgtgttggaaaataggttctaaatcgtctcctccaatttgcaaaactctaaatttacgtggcatcattttcaccttctattaactcatcgagctgattaataatattcttagaagcatatgcatctattaattttaaggaataggcgtacgcataattccaatttttcaaataaaataaataataatttaacgcatcatctaattcatcaactgtatttataatacggccattgtcataatcagagacgtaatctgtttgttgaccattaatttgtggaatcccagcgctaattgcactaatttgtaaatacaaatcaggttcttttgacatatctattacaagtcgcaacatccgcaatacttctacaacatcatgttcagcatgtatcgtcttaacagcaatgatgtcatcttgatcttcaggtgtcattaatgctgaaacattaacatccgcattctgtttagtctgatattcctcatttaccgacgtaatacattcatgaagccacatcggtatgtcattttgatggcgcgttaataaaattaaacggtaatcatcttcttgtgtgatataatccacaagtcgttgcatcatttgttgcaaatcagcgtcactcataccatctatccatacacctataaatgtttccatcaattgactacttatattaggtgattgtctcgtttcaaatggcgtgattcgaatcattgtattctctcgctgatacttctcttgatgactaattaaatcacgttctagttgcacactatcaacaattaaatgggcattctttacgatagattgatattcctcatccgacacagtttcatttctatttttaaaaaatgaataacttaatgatttcgctggaatatgattggctatttgtcgattgtgcctagcatctgaagccacaatcacatgatcatcttcatgtatttgttgtgcaatcattgcttgaaatttttcttcaattagttgagccatattgttatattctatttgttgatagtgatgttgatatctttttgaaacagtgactctgccatttttcaaatcttcatgaagtacacaatctccattaatcgttaaatattcttggtaagaagcctctccctgatcatcaaaataacgtatcgctgataaataacctctgtcatcaaaaatataacgccgttgtaactgatctctttcaaattcttcaaaccaaattgaatacccttcttgactaaaataaatatttgtataggtctgttcactcgtcacacattttaataaatacggcgtgtacacaaactcaacatcatccggccattttaagtgatgataattaatcgcttgtggcgcatggtgaatgaatccttggatttcatcaaacacagaccaatactttgtctcatataagtcatatcgatgtaaaaatgttcttaaatttggtgcatgattgagaacaatcagacgataatctaagtcattttcaaggtgcattcccattaaactaatcatatcgtcaaattccgtcttattttgtagttgataatacggcacagtcgtgtcttgccaccatcgttggtcatcgtaccaagctggaataaagtatttcataattacctccttaccaatactggtttaaaaatggcttatatttatcaaaatataaatatgtacgaattgtttctgcaatattaatactgatgtaaactaatacaatcagttgtactgagaaataaatttcagtagataaatgcggtacaaacaatgtgaaataaagcggtataccaataatgactgtaactaatgccgatccaaaccaacatacgcgtcgtgcttgataatttaaataacgttctgtacccttaccaggtttaactcctgaaaaataattgccactctttaagaaatctttggatttttgtttagtattgattaaaaatctcgataaaaaataacccaataacatttgaatcactaaatacaccgaaataccaattggactatcaaatgtcatcattggcatatcatctgaaacgtctttattaaacatagataaaataaaatgaataccacttttcaagaaaacaaatgctgaaatactcatcattaaagtaatactgcctgcagggttaactttccaagataaataagatctcatatttgttgcggaaacgttcattaaatcgatatatggtattctcacttctactaattcaatgaataataagataaacaatgtgattatcacaagagtgattaacaacgcaatcacaatatgacttgcatctatatattccattttttgatgcatcattgatttaataatgctaaccattacaatcggcattggtcctgcgatgccgtaacgactatttttgtcagctaaccaaactaataacatcgttccagtaaccaaaatcaagattgttaagtaaatattgtcttgatgaacacgttctttcgaaacatattcatgaatcacaaaataactttgaataacacttaaaattaatgttaagatgcgctctttataatgcttctcaagacttgtttgtttcatgtatttatccatattccgataagaaatcagcatcaagataatcattgatgttaaccacggacctaatcctaaagtgaaaatgtttaaagtattaacgtctccacccatattagaaatagctattttaaaaaatgactcatgttttacttgcatatcgttataggaaacgatggaaatgtttgtacctaatatataaataaacaagataaaacatgtgtaaagtatacgtttatatataattttatattcgtattgttgtaaaagttttaacatgttgcacctcttttatatcaaaaacattaaaaagactaaggttatttcactaattattaaaatctgatatagattttttagtgaacaacgccccagtctttttaattttagccaactataaattcaatttatgcttgagaatcatcttgatcattttcatctttctttttctttctcttcattaaacctaaaccaactaataatgtcataatgccacctagtaacccattttgttttattgattcaccagtatctggcaatctttcttcactttgcgctcgtgtgccattatgtttagtcgcttctgatgttgcgcttaatgtaggagactcactcgtgctcgttgttgcttcacttgttgaaatagatgtgctcgtgctgtgtgtatgatgcatactcattgagtctgacggatgcattgagttagattcagatgtacttgttgagccggacatacttgttgatgttgaattgctcattgaagtcgagttagacatacttgttgatgttgagtcagaaatgctttgtgaaccagacatagatgtactcagcgattcggatgtgcttgtcgaatcggatgtgctcaatgacgttgatgtgcttgttgacactgattctgagttactgatagatgttgaatcggattcactcattgatgttgagtcagatacgctcgttgaacctgaaccagacgtacttaatgattcggatacgcttgttgaagttgaaccacttgttgagacagatgtacttgttgatgtcgagtctgaatctgatgtactcaatgattctgagtcactgatagaagttgaatcacttgtagattctgattctacagcactttgtgaaccactgatacttattgaagtagaatcactgatactgtctgatgttgataatgatgtcgacaccgacgtgctttgtgatgtcgatgtacttgcactcattgacattgatgttgatatcgatgtacttaaagaaccagatgcacttgtacttgttgactggctttgtgccatagaatcacttagcgactctgatgtactcgttgagctcgagtcacttacacttattgaacctgatattgagtcacttaaacttgtcgatgttgaaactgatacgcttccgctcattgagtcagatgttgaaagtgaagtactcgttgaatttgatccactgatgctagacgaatcacttgtagacactgagtcactttcagatgcactgatgctcatagagtcaaattgactattacttgttgagcttgactgagaatcactcacgcttgttgacgttgattctgatccactcatactttgcgagctacttaatgattttgaatcacttaatgaatccgaagtgctaaggcttgtggaaccacttaaagatattgatccacttaatgagtcggagtcacttgtactagtagaatcactcattgatattgaatcacttagcgaggtagactcgcttacgctttctgaaccacttaatgatgttgatgtactcaatgaaccagatgtacttgttgaagtcgaaccacttgtcgattttgaatcacttaatgaatcagattcactcacgctttccgaacttcttagtgacatcgatacacttaatgatgacgaatcgcttgtgcttactgaatcgctcatcgattgtgagccactcaatgaactagactcgcttacactttctgattttcttaatgacgttgagacgctcaatgagccagaatcacttacgcttgttgaaccactcatcgattttgagtcactttcagaattagattcacttacactttctgaatcatttacagattctgacatactttgtgaatcagatatgcttgcgctcattacttcactagccgatgttgatgtgcttgtcgaatcacttaacgatatagacgcgctcatcgaaccagatgtactcgtacttgttgagtctgatgttgaatcactcacactatcagataatgacgttgaatcactcacacttgttgatgtacttgttgaaagcgacatactttgtgaatccagcgtacttgtacgcatcgaagtactagttgaagctgatgtactacgagagtcacttgttgatgttgatgtacttgccgatccagatgcacttgtacttcttgatgtgctttgtgaatcgcttaatgatgttgatgttgaatcggattcacttgtactttctgatgttgagccagattctgatgtactttcggatactgactcacttacaatagtcgacattcggattgatgttgatgtactttgtgaattacttaatgacgttgatgtgctttgtgaatcggattcactgctttgcattgacgctgacgttgaatcacttaatgatgttgacgacgaatcggattcacttgcgcttgctgacgtactaattgcattcgatgtactttctgatgttgagttgcttgtacttgttgagtcactgagcgatgttgacgcactttctgatgttgattcacttgcacttgttgatacactttgtgaatcagattcactctctgaaccacttaatgatgctgatgtgcttgttgaacctgattggctcgtacttttagacatacttgttgaatcgcttagtgacgttgatgtcgatgtggattcactttggcttgttgactgacttgtatatgatgatgtgctttgtgaatcggattcgctcgtgcttgtacttgttgaggttgaggcactttggcttgctgagtttgagtctacaccgctttgattcattgaggcacttagtgacaatgatgtactcgttgagtcagacaaacttgtactcgttgacgtacttgtacttcctgatattgattgggacatgctcaggctcattgatgttgaatcggattgacttgcacttgatgatgttgagccggattcactctcactcgttgaaccgcttaatgatgtcgatgcacttaatgactctgattttcttgtactgattgaatcacttgtcgacattgatgcacttagtgaattggacttgctaccacttgtggaatcacttaatgatgttgacaaacttgtagagtcagacaaacttgtactcgttgatgtgctcaatgatgttgagacactctcgctcttaaccgttgatgttgatgcgctaccacttgttgacgttgaaatggacgtactaccacttgtggaattgcttaatgatgttgatgtgctaccagattcagaattactatctgataaagacgtactatcgcttgttgaaccacttaatgactctgatgttgattcggatgtgctttcactcaatgattcacttaaaaaagcagatgcacttttcgactctgaatcacttgtactatttgattcacttaatgatatagacgtactctctgaaccagatatcgcttcactgatagaatcgctcgtcgacgttgagtcgctcgttgaatcagactccgatgtacttaagcttgtggaatcactcatagatgttgatgtacgttctgaattacttgtacttaacgatgtcgaagtgctcaccgaaccagatgtacttgttgagacactttgtgatattgattcacttgatgcagttgaagctgatttgctatcactcgttgaatcactaaacgacgttgatatgcttgttgaatcggattgacttgtactcattgaaccagacgtactttgtgattccgacgtacgtactgaactacttgttgatgttgatgtgcttgttgaacctgattgactcgtacttagtgataatgacttactatcagaatctgatgtactttgtgaatcacttaatgattctgatgtactacctgactgagacgtgctcattgaactacttacagacattgatttactgtctgatgcagataatgacccacttgtactgatagagtcactgactatctctgaagtactcattgagtctgatgtgcttgttgagacactttgtgaccctgctacacttaatgatccagatactgaatcacttgtactcgttgaatcgcttaatgattctgatgtactcatcgatttagaatcgcttgtacttaatgatattgatgtactttgtgaatctgatttgcttgttgacgcactttgagagttggctatgctatttgaaatactgatagagtccgaggtgctagctgactcgctcaatgattctgatgtactaattgaatttgatgtactatcacttaccgattgtgatgtactagccgaatcagatgtacttgttgataagctttgtgacttagacaagcttcctgatgtactcatacttaatgagtcactgagtgatgttgatgtacgcaatgaatcagatgtacttgttgatagactttcggatttttcagtactgctagagttcgaaatcgaatcgcttaatgatgttgatttactagctgaatccgacatgcttgatgatacactttgtgaattcactaaacttgtgcttgttgagcttgatacactattactttcagatgtgcttaatgacttagatgcactcactgaatcagataggcttacacttgtcgatttcgaggtactagctgatgtagatactacaatcgatcctgatgtgcttgttgatgcactttgtgagtcagctttactcgttgagacactttgggattgttgggtacttcccgatgttgatacggaatcactcatgctatttcttgttacttcatatttaaaagttgtcgtcgttttgttaccgctcgcatctgtagaaacgattgttatagtacttgtaccaatgtttgttggtgtaccactaatagtattatttgtgctatcgaatgttaatccagacggcaatcctgtgactgtatttgttactgcattcccactattatcttgcgtagcaattttaatcggggatattggtgaatacacttctgatgattgatctcctattggtgtcactgttggtgctgtcgtatccacaacatttattgtaaaagttgtcgtcgatttgttatttgcttggtcagtagatactactgtcactgttgattgaccaatttttgttggtgtcccaatgattgaattcgttgcactatcataacttaatccgcttggtaatcctgtaactgtatttgtcacagtcccagtaccattatccgttgtagtcaacactataggattcattgttttacccacttcaatggtttgattgcctacagttacagttggtgcttttacatcagtaaaataatatgtcactgattgtccagcattcgtcatttttacagttttatttgtatcattataagttgacgcatatgaactatcgacagatgtgtagttatatcctttagcagtcaatgcagattgctgattatcgattgtcacgacttgatcaacatttcctgaatatgtttttgggggaataatatctttacctgttgttacatcaacgtatctcacttgtgtaacagcagattctgtatattcgaatgttccaaattgtacttgttgtaaatttgtcgcgccacctgttgaggctgtcattgataatgaaaagttggtcgtaccactttttgcaatccaatctgaaatattacgtgtccatgtttgacctgcatacgtgacagtcataacttttgtatcaccattataattaatatcaaaatcttgaaatgcgttatttgttggttgaacatttaactttgcagcattatcagctgctgaacttgatgtatatgttgatgcaacaccataactatctgttgttacaaaggcaccaaacgcacctccaccagcaacactagatgggtcagctttcgcctttgctgatgcattcggtgtagatgtattgtgatacgtatccaatttgaagccaaatgcgttacttaagccaccaatacctactgcggcaccgtttaaccctgtttctcccaatacaccaggtgaaaaggcaaaaccgataccatctccaccatttccatgcccttcatatttgttacctaaatttacttttccagaaaaatgaaaacttttattagagtcaatacgtgttcctaatgtaatagcacctttttggctgtatgcatcctgcgttaacgtcacaataccggtactttgatcataagtagcattacctgacgttgtcatatattgtttgaggttatctttattaaccgtaatcgtattagcggttactgcacttgtcgtcgctgctgacgcaaatgttgacatagctaagcgactgaaagttcgaatttttactggtgcggtgctagttgacgttgtgctagttttgtttaagttggctgaagatggcgttgtgctttgtgaagtgttatttgatgcagtactttgatttgttgatgtattaattggttgttctgtacttgaagttgaagctacagatttagtatcagaacttgatgtagtattctttgagaatgttgattctgatgtagatgtcaatttttcttgttgattgcttgtactattagttgtcgaagtgacattttcagacttttcacttgagactgtgtcactatttgatgtttgtaccgaactactatttttcgttacgcttgtggaatcggctgttgatgttgatgcttcgattgtcgttgagttttgattacctactgtttcactttgtgtatttaattcagatgttaatggtgcatcagaagccgcaaaagcttgctggtcatgcaacatgtttaccgtgaatgcaccaccaataaccgccgtagttttcagtccgtatcccgtcatttttttactaatgctttgattatcttgactcactatactatgactaataaatggtagtcccattattttgaacatttctatttctttaattccggatttcacccaattttttccagatttataaagccttactcttgttttttcgtttgctaagctgtcatgaaattctttctgtcttttactcatgtaataactccttgtattatctttacattcattagattataatatatgccactattcaatttaatacaactcttttttcaaataaaaaatacttcatttgtcaaaatccattttttctcaaaagtatatcctttgatgaaatcgctttctttattgtgtgggatttagtataatattttaactatattctgaataacatgccttattatgtttatataattttgaaatcaatgtttatcaatttagataacttttacttatttagtaaaaatgtctttttatttaaatgtatttatcatccaccttttagtcattaatagtcaatttacaactaaaatataaatattatatttataatacatctttaatattaaagtaatatcaatatattttcaataaacctagtgttatatatctgaatttctaaaaaattctcctttaaaattataaatatagcgacatatcgcttcctggttttgaaatataaaaatacatcgaaactaatttcaacgtgtagtttcgatgtattgaaaatgattgaattcattatttcttgttatctgattaattatcaaaatttcttccttctaaacctgcaagctcttctttagaagctgatggtgctttcatttcaaatatttcatttacaaccgtgtaatcataatatcctaacctagcaataggtttaatcgacttaatgtctaatttaccattatcaagaatgaccttatcgtcaatatgaacctgagcaactcttcctataacaatatcaactgttgatacagggtctcctgtcggaatacgaattgtttgaacgtactcgcactcaaaatgtactggcgattctttgactcgataacctggtgcttctatacatttttcctttgttacacctgcaaaattaaattcatcctcttctggtggtagtgccttcgacgataaattaacagcttctcttaaatcatacgtggccatgttccatacaaaccaccctgtctcttctgcattttttactgtatctttacgctcatgatcaccaagaacagattgatttgctgcgaacataaccataggcggatcccaagttaagttttgatactgactataaggtgctaaattatctttcccatctttcgatacagtagagatccaccctattggacgtggtactgtactacttttaaatggatcgtgtggtaagccatgactccttacaccttgcttcggcgaataattcattctatcctcaccccttattagtaattacatttaaggttacgctctcatgacataagcgtctaatataaataatcaatttatttataagtagaaactatatatgacgtggttgcttataatttgcgttcttgattcgaaaatttcagataaggatttatgtaattaatatttaatgatgttttttgttaatttaattaatattagttaatataatcaagattagcttataataatattgaataacattattttagtttttgtataatttgcctatcaactgaaaaacagctaatacaaaggagctaatgaagatatgagaaaaattatgcgacccttattatgcacatcaatcatagtaagcggttgctctttcataccaaaaaaccaaacaaaagatattccaaagacggttagcgtcaaagattatgatggtcaatatattggtgaacataaaaaaagaaacgaagtatttctgaaaaaacataaaggtgaagcgataaaaaaatataaagactatgtgaaagatacatttggttatgattgtaaaattaatttagttgaggcctatactaatgcttctgggtttagtgagaaaagaaaaacagatggtttagtagtcgtcggcactgtcaattatgacgttccttttcagtttagattgatttttgttgaatctgacaatggcataactatcacaacatttacacctggccataaaaacgaaacgtcagccgcagttgcagccatgatgtataagcgttatgaacacgatatagaacaagctcggttaaaatttaaatcagaagttgagaaaaacggttattatgccatgaatgaaaaacttcaaaagaaacaagaattcaatggtgttactaaacaatttttgaatttcaacacagacagtatcgatgatttggataagttcaaaaaagaattcaaacctgttatgcacttaaaaggtgatgcattcaatcaacaattacaaaatttaattaataaatatcctgaaattaagaaaagcatgaaatatgactttattgcctattacgataaagatgagaacagagagactgttgctaactatgtttggaacctacaaaaaacaactaatgacacaatgaaacttcatccaggaaataaaagcatcatattttataaagataaagtttctgcttcacaattagatgagcataaacgtttacaatcagattctcaagaaatctccatttctggaggggaaaacaattaaatataaaattattagctattattagaataattaagttataattatattggattaaaacactttaactattatttatatttttattttcgttataaaaacactcaatatagaggagatattaaaaatgagaaaagtaactggctttgtattgtgtacatcacttattttaggaggctgttctttaatgcataaagatcaaacaaaagatattccaaagacggttagcgtcaaagattatgatggtcaatatattggtgaacataaaaaaagaaacgaagtatttctgaaaaaacataaaggtgaagcgataaaaaaatataaagactatgtgaaagacacctttggttatgattgtaaaatcaatttagttgatgcctatactaataaatctggatttagcgagaaaagtaaggtagatggtatctcagtggttggtactgtcaattatgacgttccttttcaactccaattgctttttgttgagtctggaaatggtataactatttcaacatttacacctggtcatataaatgaaacatcagcggccgtttcagccatgatgtacaaacgttatgaacatgaaattgaacaagctcgattaaaattcaaatcagaagttgagaaaaacggttactttgccatgaatgaaaaacttcaaaagaagcaagaattcaatggtgttactaaacaatttttgaatttcaacacagacagtatcgatgatctggataagttcaaaaaagaattcaaacctgttatgcacttaaaaggtgatgcattcaatcaacagttacaaaatttaattaataaatatcctgaaattaagaaaagcatgaaatctgactttattgcctattatgataagaaaagcacaaaaaatgttaataaatattcatgggatttacaaataccaacaaatgacacaatgagaaaaataccaggatcaaaaatgatgtatttttacaaagacagtgtttctccatctgaaattggagaagatggtaggttagaaaataaaactaataaaataactatgtctggtggaaattgggaaaaaatcaagaaagaaatcaagaaataagagtcataatatattacacaaaacaaatcaatgagttatcaactttaattataattgaactcttataactggagatagatgctaatggaaaacaataattatataactgatttagatgctattgaattaagtagtggttggaattacaatgaaaaattaaatgttggtaaacatataaatgttaattctcactcttataaagtaattgataaagtccatccaaccagtactggtcttggatataagatatacgaacgatatgataataaaaagccaacaggaaggttaataatatcgtttgatggtactgactttagtgacattaacgatgtaaatacagatttaagactcgctggagactccattccaaatcaattattggaagcaggaaaagtgtattctaaccttaaaaataaatatcaagacgcaaatacaatggattcatttgaattcaaatcaaaatacaatgaagattctacaaattacgaaggaaaatcaatcacaaatgcagggggtaattcactctctggagccatagcccagtatttaggtgtattagatccaggtcttagcgtaactactacaaattctgcacctataccaaaatctcttactcgtatggctcgtcgagatgcaaataatatacataattaccacagtagaagtgataccttaactagaattaacataggtggacttatgtatcattccatggtcggaaagcacattttcctagaaaatggtgtgtctacgtttggagcattggtacctgctcatactggatacaactttgaagaaaaagagaagttagaccattttgatcaagacaatattattaacaaggaagtctacacgagtcgcaatggattgaaaatttatgctgacatggatgaacacactccaatatttgtatggagtggtgatgctattggtgctggtacatcaaaaataaaattagacaaaggacatctggcggatctgaatgactatgtgcatggtagattaaccgaatatgtaaataatattgatattaaaatgaaagacattcgaacatccgttgaacgtgaaaataataattttagtcaacatgtaaatgaaacgaaagatcattttaaaaaagtaataaaacttaacgaattagaaggttggattcacaacatatccaatctgattaggactaaaattgaaagtaaagcggatgaattaaaaggtaacctcagaacacttagagaccaagataatattttagatttagtaggtgccgatcatattattaattcaattattgattttattgataaaattaccgataaaatttcaaaattcattaaatatggtgatgatttcatagaagctgcttttgatataattagcaacactattgtcaaaatgtttgtcaacttatcagaaggatttgaggatggtgttagagaagaagttttagcccatttgaatgttgtcataccaaatattcaaattatcaaaaatcaagtcactaatttcggtgatggcattaatgatatattgacccaaatgacccatttagatgacaatgtaatggttaacaacgtacccatcaataaaaatgctacaaagcaaacatcaaaaccacttgcagaatctaagaatttattattaaatttagaaatccgaaataaagtgatggaatctggtttggctacacttgcgtcaaatataaatcttttattagtaccagaaacactaagaatcattgcgctcatttctatagttgatgcatgcacgccaacattatctaattttgttggtaagattgaatggattgcctccaaagttccatttgccaagacaacagcggaaacacttaaatctttcaaaaatcttgttgataaattacatcaacaattaactgatatgcgattaatccttggtgaacttatttttacagaattaattattgttgagatgcatgactttttcaaaaatgccctactatcagatagccttttaagagatattaaagtattaagttctaatgctaaaggtgacgccgacatgttagaaacggaacttcatgctgttataaacgcaatgtctcaaaacgaaggtaaatctgttgatgcacttaaaaatagtaccgcttctctaaaaaacaatctaaccaaattaaaagagcaactcgataaaaccacacattaaattcatatattttgggtgaatagaattatatttccatagcaaacattcctgaactacacatattacataagagattcatttttgaagaaacgggtaaaatgataaaacaaccgtttttcaaaaaattaaatattgggaggaattaaatatgattttgcgttacgcaacgaatttaaaacttgcgaaagagctataccaagccagtaaacctaaattgcaagaagataagggtatgattgaactgtttgaacatacttttggcttgcaaaaagaacttgtaaaatacgtcggcattgcagaagcaactactgctgctttatactcagctagctttatcaataaaaacatttctcgccttgcttcactatcaacgataggcattttaagtgtagctgtttacaaacattttgaagctggccaaggtaaaaaaggtgcacaacatgcattagatttattaggtcttgctactttaagtttactagatacattttcttgtaataaaaaatagtcttcattttagaagcacatactttagcacctgtgtactttggatttaatccataaacagtacactgctatagcatgtgttttgttaattttcaggtctatctattgtaaataatccccctaatttagcataatcgtttccagctaaacgtgaaacagcttgtaacgtatgtggattgattttaaaatctccttcataaatactatcatcaatatgataagttacaatttcacctattattaagtctgccccatccagctcatcccccagtaatattatttgcgataatttacattcgaatcttattttcgcttcttggattcctggcgtcttaattgctgtagatgttataagtgataaatctgtacgactcaactcgctgtctccgtacactaaaggcgctgcagtctcattaatatcttgaacgttatcttcgtctgtaatgtgcacaacaaagtctccaacccgttcgatattcaatgcagtatcttttctcttacctcctgcacgttgcactgcaattgcaatcattggcggatgattattaacaatattaaaaaagctaaatggtgctgcatttactgatatatcttgatttaatgttgttacaaaagctataggtcgtggaataattgaaccaattaacaatttatagttttctttatcggataatgactgtgcatcaaacgtatgcatatgactaacctcttttcttagtataaacatctatttctctgattttagttaatttaaacatccagtttccttctgaaatgaaaaattacttatatttgtctaataagtcttttgaaatatggcacatatgcatatcttctggatattttgataaatgttgctgatgttcttctgcacttttaatatagttagacagaggtaagacttccactgcaatttgattcctgtcatttcgtcgatcgatgaactgtcgtgcctcaataagataatcatctacacaactatataatcccgtacgatacttttcaccaatatcatttccttgttgattcacactgtatggatcaatgatttcaaataaataattcatgatgtctgtaattgataacttactatcatcaaaatgaagtttgacacattcagcataaccatcatacggactgtctaatttagagcttcttccatttgctcttcctgcttctgtatgtataattccaggtattgttgtgaaaaatgcttcaacaccccataaacaccctcctgctacataaacaactgccatatttacacctcatcatccttttttatatttttaacaaggttataccatttaataccgccatgacatgattctgatacaccttcattacgatacccatatttttcataaaatgaaattaatgattctcgacatgttaacgttacaccatctcgatgttgattcttagcaagattttcaaaatagtttagtaagcgacctgcaataccctgaccttgataatttggtgcaacaacaagacctaacacactaatataaccaccttcactattatttgtggagacatttttaaataaatcatcgctaatgtaacgctcttttatgacaggaccgttgatatatccaatcacttcatcattcttttcagctacaataaaagtttcttgaatttgttcaattctcaatttcaatgcctctggtgttgcagcttcttccggtgaaaaaccaatattttcaagtgcaataatttgatctaagtcctgcatgattacttttcttaataccataaaaacacttccttagccctatatatcaaaagtaataccttcatctttatattcattattttcaaactaccttcactataaaaaacgagtctttttattgaaagccattcgctttaatcaattagacaagttgtattatacgaattagtaaataatcatgattataattcattttaagcatactcaaaaagactggtacatgtataccagtctaattcgaaaaaatatatttagttaaaaccacttcaaaaacgacttcacttttcctggtttagtcggtctgtctaaataaacaaaattatcattaattacagaacttgcatttcgaagtaatgcttcaatgtcattcgaatatttcttcaatttatgattgtgaaataattcttgcatcaaaaatggtctttggtcacatgaatgtgcatctgaagctacaaaatgagccaaattacattctataaattgtaatgataacttttgaatgttttttccaaatccaccaactaaagaactcgatgttaattgactcaatgccccatttgcaacaagttcatataatatttctggatttttggcgatacttctatttctttcaggatgtgcaatgattggtatgtagcctctcgattgtatttcaaaaaacaattgttttgtataatgtggtacttcgcccgttggaaattcaattagtaaatatttcgaacgattaataccttgaatactaccattatctaagccttgcagaatcgaatctgtaattctaatttcttgcccgggaaataatttaatatccaatgcttgaacttctggatgcgttcttaactccgccaatttcacaagcacttgttgaaatgtattatcatatctcggatgcaaatgatgaggtgtcgctacaatacttgttacaccttcatacttagcttgctttaataaagcaatacttttttcaattgtttttggtccatcgtcaatatcaactaaaatatggttatgaatatcaatcatgattcatcagtcccataatatgcgtaatagctagcacttttatcttttggcattctatttaaaacgacacctaataatttagcacctgtcgcttcaataagttcttttccttttttaacttcatctttattattattttcagaattaatcacatagacaacattacctgtaaactttgaaaataattgcgcatctgtaactgtattaacaggtggcgtatcaataatgacaaagttataattcatcaataatgtgtcatataaatttgcgaatgcgcgagatgtgattaactctgatgggtttggtggaataggtccagacgtcaggacgtctaaatcttcaatttcagttgagataatactgtcttgatatgatgaccaattcaacaacaaactggaaagtccttcattatttggtaaattaaaaatataatgttgcgtcggtttacgcatatctccatctacaatcaatgttttataaccagcttgtgcatatgccactgctaaatttgccgcaatagttgacttccctgctccaggtgcttctgaagtgattacaatgctttgaactgcactgtcaggattagcaaacataatatttgatcttatgcctcgaaatttctcgctaataggtgactttggttgttcatggacaattaaacttgatgtacttcttcgtgtattcgtcatggtaattcctcgtaaattaaaatttttgtattgaacctaaaataggtaatcctagttgcgattcaacatcttcttccgtcttaatacgcttatctaatagttcttttaagaaaataatcaatattgctaaaacaataccaacaatgatactgatcactaagttaacagatactattggagatacttttacagcattatcatgtgctgaggaaagtattgtaacattatcaacactcataattttaggcatgtcatgtgcaaaaactttagatattctattaacaattttgtcagattcagatttattcccagttgtaactgatacagtaataatttgagagtttgtttgattggttacttttaaaaacgaattcaactcagctgttgaatactgaccatcaaactctctagatactttatctagaattcttggacttttgataatttccgtatatgtattaacagactgcaaactactttgaacattttggaaagctaaatcacttgaggactttttcatgtttactaatatttgagtagaagcagtatatttgtcaggcataacaaaaaaggttaatgccgcacttactacaagacatattgccggtaaaataagcaataatttaatattcttctttagaatatttaatagttttactaaatcaaacttttctttcatggtttcctccacataatcaatcattgtattcattatgtatgttttataaatcggacaattatatctagtttaacgaccacaaaaatacacaactacattttctctaattttttatataaatatttcatcgtttaaaattatatcatgattcttgagcgttatgtataatttatttatattttcgttctagatataatattgcccaacttcaaatatccaaacctatcagtaataaacctagataccatcgtctctatcatggctttcttataatcgagtagaagcatcatcattacttgattatttgctctttacaacaccgagcgtgcccgtactcggtaattcaatactttgcgtaacccgtcactgtgagttgggttaatgataataaagcccacatcttttaaaaagatgtgggtaatttatataatttttatttacattttaaacttataaaaaaagcgcctatgtcatgatttaccatcacataggcgcttatcaataaattattaattattactttccatttcatctaatttatgcggatttcctgtaattagatgacaacttattcttttcaggggaacattacatttttataatatgttcaaagacaaacttaaccattcacaaatataaagaataatattatcaaatcattgaacaaatcgtattttgcaacaattgatatttatattaatgcattgtatttaatttataaaattcatatacatcttaatattctcaatttcgagttgtattgtcaactttatatagattttaaaaaataatctcatgtctttttttacaaaagtaagttaattattacaaactagtaacaaaaattatttcttcaaaaatatatttagtagcgaatacacttcatctttgaattgacttttactttcttccactgctccaaatttttgcgaaaaggatgctttcaaataccaactttcaagaaacagcaatattaaattctgaaagtcttcttttgtcatctttatttttgattcatcatagaattttgctatctctttacttaatgattgatttaaatcttgtatttgtccgtaaatatttccagaaaattcctcaggcgtattagataattgaacgtacattctaatatacctttcttcgatgtcgaaaataaactcaaataagaattgatataaagcatcaattgaatagttcgatttattttgattcatcataataatattattaaggtaatcaaaacaacatttaacactttgttcgtaaatactttttttcgagtcaaaatggtagtatagactcgcttttttaatatttacactttttgctatatcatcaagtgttgtaccgtcataccccttctctgaaaataaggttattgcattatcaataatcttatccttcaatttttaaaaccccctacagaaatttaatcacactatgttacaggaaaattaagttgcaattacaaatatttccgtttaattataacaacaatctattgcaaattaaaatactatcaattaccatatggcttacaacctaactaacgaaaggtaggtaaaggaattgcaattttttaactttttgcttttttatcctgtatttatgtctatttactggattgtcggttcaatttatttctattttactagagaaattagatattcattgaacaagaagcctgacataaatgtggatgaattagaaggcattacatttttacttgcctgttataacgaaagtgaaacgattgaagatacgttgtctaatgttcttgcactcaaatacgagaaaaaagaaattattatcattaatgatggaagttcagataatacagcagaactcatctataagattaaagaaaataatgactttattttcgtcgatttacaagaaaacagaggtaaagccaacgcactcaatcaaggcattaaacaggcttcatatgattatgtaatgtgcttggatgcagatactatcgttgatcaagatgcaccatattatatgattgaaaatttcaaacatgatccaaaacttggtgcagttacaggtaatcctagaattcgaaataagagttctattttaggtaaaattcaaacgatagaatatgcaagtttaattggctgtattaagcgaagtcagacacttgctggcgcagtcaatactatttcgggtgtcttcactctatttaaaaaaagtgcagttgtcgacgttggctactgggatactgatatgattaccgaagatatagcagtttcctggaaattgcatttacgtggatatcgtattaagtatgaaccgcttgccatgtgttggatgttggttccagaaacattgggaggtctttggaagcaacgcgtgagatgggctcaagggggacacgaagtattactacgagacttttttagcacaatgaaaacgaaaaggtttcctttatatattttgatgtttgagcaaatcatctcaattttatgggtatatatagtgcttctatatttaggctatttgtttataacagcaaacttcttagactatacatttatgacatatagtttttcaatatttctactatcatcatttactatgacttttataaacgttattcaatttacagtcgcactctttattgatagtcgctacgagaaaaagaatatggctggactcatatttgtaagttggtatccgacagtatactggattattaacgcagcagtagttcttgtcgcatttccaaaagcattaaaacgtaagaaaggtggttacgcaacatggtcaagcccagacagagggaatacccaacgctaaaatcatcgctaaatattgtaagagagacagcacttatcgctatatcgtgtgtcttttggatatattgtttagttgttctactcgtttatattggtactatatttgaaattcatgacgaaagtatcaatacaatacgtgttgctttaaacattgaaaatactgaaattttagatatatttgaaactatgggcattttcgcgattatcatttttgtattttttacaattagcatattgattcaaaaatggcagagaggaagagaatcgtgaagtatagaaaattaataattttagtgttgagtatcttgatcatattgcctgtaagcacactggatggtcatcatattgcaaatgcagatgacgatccacctaaaaaactgaaatataaagaaaatagtgcactggcattaaattatcaccgcgtaagaaaagcgaattttctgaataatttcatttacttcttttctagtagtaaagaaattaaaaattatagtgttagtcaatcacaatttgaatctcaaataaaatggctaaaatcacatgatgctaaatttttaaccttgaaagaatttttatattacaagaaaaaaggtaagtttccaaaacgaagtgtatggattaactttgatgatatggatgaaactatttatgaaaatgcttatccaatcttaaaaaaatataaaataccggcaactgggtttattatcacaggtcatgttggggaagaaaactttcacaacctcgatatgattagtaaaaaagaactaaaagaaatgtataaaactgggttatgggaatttgaaacacatacccacgatttgcataacttatcgaaaaataataagtcaaaattaatgaaagcttctgaagctacaatcataaaagatttaaacaaaagtgaaaaatatctaactaaaaactttaaaaagtcgcagaaaactatagcctatccttatggcttgatgaatgacgataaattaccggtaatcaaaaaagctgggttaaaatacggtttttcattagaggaaaaagcagtcactccgaactccaatgattattacatccctagaatattaattagtgatgatgcttttgagcatttaattaagagatgggacggattccatgaaaaagattagacttgaactcgtatatttacgtgctattatatgtgcaattattattatcacacatttacttacacaaattactttaaaacatgaaaatttggagggaggatccttagtattacaattttacattcgtaatattgtgatttttggtacaccttgctttattatcttgtcacagttactgacaaccttgaattaccaaaaagtcacctatagatatttaactacacgcgtaaaatatatacttattccttacatattaatggggttgttttacagttatagtgaatcattattaacagattcaagtttcaataaacaattcattgaaaatgtcctattaggtcaatggtatggctattttatcgttgttatcatgcaattctttattttgagttatatcatttttaaaattaactataacctattcaacagtaaaatattattattgttatcttttattttacagcaatcatttttatattactttacgaacaatacagcgtttcacgataccgtgctacactattatccattaagtgaaaacactataatattcggatggattttttatttctttttaggtgcatatatgggttataactacgaacgtgttttaaatttcttagaacgttatttagttattatgattgtattagctgtagctacttattttgtgtttattgcgttagcaaatggagactattggaacgttaccagcttttcatattcattaacaccatataatagtattatgtttattgttatcttgggtatttgcacgcattttaaaacaatgttatttaatacgattcaaatgattagtgctttctcattctttatttatttattacatccaatcattctagactcattgtttgcatatacaaatatatttgaggataatacaatggtctttctagcgatatcactactattcattttaggattatgtataggtgtcggtatgatattgcgtgaattctatatctttaggtttattattggaaaacaaccatataaattgaacattaatgcttattaattattaagctatgttaaaaacacgcggtgggcgaaatcagtttgaattgactgacttcgttttaccgcgtgtttaatattgttatacatatattctaattgcacatttgaactacaaaaatgccaatgggagtggaacagaaatgatattttctcaaaatttatttcgttgtcccaccccaacatacattgtctgtagaaattgggaatccaatttctctttgttggggcccacaccccaactcgcattgcctgtagaatttcttttcgaatttctctgtgttggggccccgccaagatattacttgaataactcttttagaattctaaataatgatccgattaattgaaagaagtctgcagtcattgttaattcctccctttactttttaacttatgcttgcatagtatcagtcaccttttcagttttcactaaatcgtctgctaaatgatgccaaaaatcttgtaattcttctcttgtgcgcactgtatcagaactgtcttgtcctacaaagtcaacatgatcccaatcatgttttgtaggcgtcacttgccaaatgcctttttgaattttatccgtcgcatttgtataagcttgattaaatggatgttgagaagaaataacggatactaaaccatcgttttctcgccattctttttcagtagctttaccgattaagttaccagtaatcacaaatgggaaaaacatatttaagtcagctttttgtctatcactatttaatgctttgtgcgttgcttcaccagtgtatgttttatacacaatgttagggttcaacgacgttttacgatttaaatctgttgcaccctcacgcgtcagatcgtaaaatccattatcttttgatttccataaattagattgtttaacgcgtttgacataatcaatatatgattcatttggcttctgttttagaccccattgagccaacccgaagtctactcttgaatttttattaccaaacattttaccgatatcaaatacaatttgtctcactaaagcttcattaccagctaaatctgaagcatgcgttccattatgtggtgttcctaaagtagtaattgatgaaatcatattgtcattattacctttgaatagtggagaaatttcgccaccatgtttcttttgatactctatttcttcacgattaccattacgcagtaattcttctagttgacgtatcgtttgaccacccatactatgtccaacaaggtgtatcttctgtcctggtttccagtctttgtaaattccttcgtatgtttttccgtagcgttcatgtccatattttgctgcatgtgctgcaccataatctacacggccgcctttgatataataataaagttcaactgcacgatcatagttgcttccaaaagcacttatacttgcttcataagctttgtaaccgttttcttctaaatcttggcgaatgttcattttattaccgccccaataatgagctaacactgaaggattaatatcatctgtaaacccattgaaaccatgaactaaaacgatagggtcttgatttttatactgcccttgtttggcaactttattcgtttgatcacctttcgcttttgcagtaagttcctttgtccctttgtttggtaacgttgctactgcactactttttaataaatttaatccttttttcttgtcattgtcctttgttggttcaactggtgatttttgattgttttttaaatctgaaactgatagtgttttttcatctttttgaggattcacttcttgttcattgttaaaatgatggcttgtcattttatcattcgattgattcttttgttgcggttgtactttttctatttctgtctctctaacaatttctggttgacttttttgatcagacttatttaatgatgttgattcctttgttcgactttgtaaaggtagattgttattagcgtttgaaccttgactattagctgcctcttttgcctgttgctgtgacgccgctttactttgtttgccatcattaatagcctgttctaacccttgatttacatcgctaggattagcattgttattttttgttgtatcacgttgaatatttttattattaagcgatgattttttatcatcctttagttgatttttattcaaatcatctgttttacgatgattttcttctgatattgttttatcattatgcaagttcttagttaaattttcagtatgttgctgttcgtcaacaccgttttcacgttgataattagcattttccctagtttgttgatccccaatagattgtgctgtaactgtatcctcctgtgaatttcccatattcacttgcttctcagctgcttgtgcttgtccaccacttaaaaatagtaatgtagctattaaaatggaagatgcacctacactaaatttacgaatactatacttattttgacttttcatcattgtcagcacctctatttttttattttagataaacaaattgataattattcgaggaataaactcaaataatttacttaaccaagtactcataatgaccatcctttctattgtttaatttgatgagaaagcgtttacatttgcatttaaaaaatatattctccaaagagaatttaaagtgtatacgctaatcgtttcaaattattaattaatattatatttgacaaaatttaattagtcaataattagacacaatttaattatgcaaattgtaacttttttacatacatcttttgtgtttttttatatttacatgtttgggtcttgattccaatgatgtatcatttttttagattagctgtatgaaggtaatttatgagctattacagttttaattattgctggtgtcgtattttaaacctaaaaatatcatttcttctacaatgattgtattaggataagccattacgcttgttcctacattaaatatatacagttaattttcttccctcaaaataagtatcctactatttttaatttattgtttaattactcttgaactacctttaacttaatctcgaatttatgatgattagcataaaaatacaccccataaagttagttttttagtccaactttcgggatgcacatcttagttctaatggagattgtcttttaaataggctatgacatttctatttcaggctagatatatttttattcacagtataaatacaaagaatataaatacaactatgatattaataggtagtaacgacaaacataactctttagctttttcgccattttttcccttcataacttcattatatcgattcatatacttttcaacatctttaacagtgacatctattcctgagttgctcaatttacttttcataattatttttgatttcgtattgtgattatccactacttatctataacgagttcgcaactttagtaccatcacagcattcatagttaaaatatgttggttcgtattttaaacttgaaaatgtcacgttttccacaatatttgtaagtgtataagccatgatccttttctctatatctcagtccatacttgctttaccactgttcgatattttgtcgttcgcctttaaagttattgcgcttatgatgtctacgtgctaattctgcctcaatttctgaaaaatcaacgcctagcgcatgcatcaagacaaataaatgataaagttcatctgctacttcacttacaaatgcttttttgtcacctttaattgcttcgattacgacttcaaaagcttcttcaccgtatttttttgtaatcttttctataccttctgttaataaatatttcgtatatgacttttcattattggattgggcactatcttgaactgtctgcgctaatgtttgcactgaaaatggaacttctgtgttgaaacaactttgactgcctgtatgacatgttggtccatttggtatgacatcaattaaaatagtgtcattgtcgcaatctacatgaatatctttaacacgttgcgtatgaccagatgtttcaccttttgtccatagccgttgtttcgaccgcgaatagaaacataccacaccatcttctatcgttttatcaaaagcttcttgattcatataacccaacatcaatacttgttttgtttgattatcttgtaaaattgctggcactaaacctttgctaaaatcaattttgtaattggtcatcttactgctatacccccttgccgtatcacttctttaatagattgaaccgtcgtttctcgatcatgtaatatacttgcagctaaacctgcagaaacatccgtctgatcaaataattctacaaagtgttgtgcattgccaccaccaccagaagcaatgattggaatatttacaagggattttatttttgcaagatgctcaatatcaaatccttgtttcataccatcatgccccatacttgtaacaaggagctcacctgcacctaactgttctacttgctgtacccagtcatatactttaatatttgtcatttttttaccaccatgcgtacaacaataatgtgcttttctttcaggatcataatagctatcaattgctatgcagatgcattgtctaccgaatttatcactcgcttgtttaatgagctgtggattttttaaagcacttgaatttaatgatactttatctgcaccatgatttaacaattgggtaatatcatcaaggctttgaatcccaccccctacagtaagagggataaacaagcgtgacgctgtctgttcaatcacttctagcattaagctatgaccctcttccgtcttagagatgtctaaaaatactaactcatcagcacccgcttcattgtaatacattgctaaatcaacaggattcccaatatcccttaatcctttaaattgaatccctttaacgacacgaccatctttgacatctaaacatggaatgatacgttttttaatcattttagcccctcccaaaatgatgcttgatgtgcagcctttcctataatagcagcgtgaacatttagcgacgctaatcgttgaatatcttgctgatgtctaataccaccagacgcgatgacaggaatcgtcgttgcctttactaattgaccagttaattcaaagttaggtccggacattttgccatctttagcaatatcagtatatataatgcctccaagaggtatatccgataactgtctcacaaaattaaataaatttaactctgtgtcctcttcccatccgttcactttaatatcttctccataagcatcaactgacagataaatacgacctggaaatgtatgtgccatctctttaagccattctgtatcttgaatacctttcgttccaactatgcaataattaatccctgcggcaaagtagtccatgatttgtgacttcgtgcgaatgccaccacctacttcaatatctttggttgttaatctcctcaatgacttaatataatcaaactctcgggcatgctgtgccttagcacctatcaagtcgacgatatgaatacgattcacacattcaaattgactatagtaagcaatactttcttcagccgaacgcgacattttttcttcactatcatatttaccctctgttaacctcacacttgttgacccaatcaaatcaatcgctggccataattcaatcatttataaatcccccttgtattgcctgacgcaaaatttgtaacccatatgtaccgcttttttcaggatggaattgaataccaatataattgttaaattgaacaattgctggaatatcagtcccatactgcgcatatgcaatgacattttctgacatcggcgcttgataagaatgtacgaagtaaacatcttgatttaacataggatgcttactcactaaattattccaacctaagtgcggcactgggtattctgtttggatacgcgaaatatttccttggataaaccctaatccagatgcatcgccttcatcactatgctcatacattaactgcatgcctaaacaaataccgatcattttcttatcagtattcttagccaatattgcatcgagatttaatcgctttatctctgacatcgcatctttaaaatgaccaacacccggtaatatgattgtttctgcttgatcgattatattttgcttatttgagacaaccacctcataccccaaatattcaatagcgcgttttacattactaatattccctaatccataatcaacgatgacaatcattcaatcacacctttcgatgacggcacacgctgatcattagtagaagttagcgctatgcctaatgcacgagaaaatgctttgaatatagcttcaatttcatggtgtgtattaccaccacgaatcaaatcaatatgcgttgttaatcttgcattgattacgactgctctaaaaaattcttctactaactccgtatcaaacgtgcctactttttctttacttaatgatgcattgaatgataagtatggacgcccacttatatccacaacaacacgtgctaatgtttcatccattggaatatacattgttccataacgaacgaaatgctttttatctttaatcatttcaagtaacaattggccaataacaatgccaatatcttcagttacatggtgatcatctacgtcgatatcaccttgtgcctcaatgtttaatgacagaccgctatgaaatgtaaacaaggttaacatatgatttaaaaagcccacacctgtattaatatgcgatggtgactggtcatctgatattgaaatatttagttgtgtttcagctgtgtttcgttgtttttgataaatcatattttgcgctccattctttaacaatttcttctaattggtttaactgtgatgctgttgcaattgaatatcttacatagcccttcatcaccggctcatcataaaaacgaggtttaaatccttgttcatatacgtattgtcctaattgttgcgccgctgaacctttagtaagtacaaaattggcatgtgatgggaatactgacattttatctgcaacatgtgtatcaaatatttgttttaactgctcagctaactgtcgttgcatcgttaaaaattgtcttgtctcttctctatgtctaaaaatataagtcgcaatatttagcgtaaatacatttaatggatatggatgttctattgtttgaatacgctgtatcgtttcagcagtactcattaatacacccaaccttaagccggcaattccaaacgcctttgataatgtgcgcattcttaaaatgtgtggtgccatttcaacatcatatgccatgccataatctaaatatgcttcatcaatgacaaagtatccgtttattgctttcatcttatctgcaatagctgttaaaaatgccgtatcaaattgcttgcctgaagggttatgtggattactcataataaaaaatgatggttgtacttcatcaattttcgttaaaatggtttccaaatcaaacgttaaatctgatcctgcatctacaaatgcaatttcacgatttacttgtgccgcatatgcttgatacataaaaaaatctggatttagcgttaatgccggaccttctggcatgatcagcattaacttttgaatcaattcatcagagccatttcctgcaataatttgttcaggcgataatccgtaaaacttagcataagcttccttaaattgttcatatgctgcatcaggatataaattatatggcgttgcactaataatagacgtcattgttttttgatccaacggcgtaactggactttcatttttatcaatataaatcatttcaattacactcccctaagactgacgtattaaaatagactgttggtgattgtataatgcttcaacatgagcaatatgttgtgctgaatcagcaatttgttcaaacgtatcttttgataaatggatgaccgtgttccgtgttaagaaatcattgaccgataacccattagtaaatctagctgttctatttgtaggtaatacatgacttggacctgcaacgtaatctcctatgacctctggcgaataatgtccaataaacaatgcgcccacatatttcactttttcaatatatggttgaggatttactgtttgaatcgacgcatgttcaggcgcgattgtattcatgacatggcatgcttcatcaaaattactagcatggataaggtagtgttgattagcgatacttttagaaacaatgtcgtatctgtccacattaggcaatgctttagcaatacgtgattctaagtctttaagaactttcgcatcttcactaatgacatatgtacgcgccaattcatcatgttcagcttgtgcgaaaacatcatatacgatggcatctaaatctgcggtgtcatcaataatcagtgctatttctgttggtcctgcaatttgatcaatacctacctgtccaaataaatattttttggcatatgcaacaaattggttacctggacctacaatcttatcaactttaggtatcgtttctgttccataagttaatgcagcaatactttgagcaccaccaacttgaaacacttgatcaacttgcgtaatataacatgctgctaatacctcttgagatataccgttaggttgaggtggtgtcacagcaacaatattttctacaccggctacttgcgctaaagtcgctgtcattagaaccgttgatggataacttgctttgccacctggcacataaatacccacactttctagtggatggtatatttcataacactccttcgattcttctatctgttgattcgtctgcttaatactttcttgatatgctttaattctttcataactttgttgtaatgcttgtttagttttctcatctaacgtgtcaaatgctgctttaatttgttcatggcttacttctaaatgatccgttttcgcatgatcaaatgttagattatacattttcaaagctttatctccatgaaccttaacttcctgacaaatatcgcgaataattggatacaaagactcatctaatggtgcttctaatgaaaattgatttaaaaattgttgtgcattaagcattggcaatagacacctccaaagagcgaataaattgctctattaattgtgattttttaaaataagctgctttattagttattaaccttgcattgatatcactaatatgttgcttttcaaccagtccgttcgcttttagcgtagtacctgtttgaacgatgtcgacaataccgtctaccatatctacaacacaggccaattcaacagagccattcaatttaatcaattcgacatcaataccttttgatttaaaatatgtttcagcagtatgaacataactcgttgcgattttacgataattggtcgtttcaggtttcgctgcaaccgcaaaatgacatgctccaaaaggcatattcaacaaattattaacattgtaatgacgctcatctaaaatgtcgctaccaacgataccaatatctgcaattccttgttccacatagattggcacgtcacttccttttactaaaatgcattctatattatctacacttaataataattggcgttctctattttttaatgtttctgataatgtcgtatattcaattacatctaaatagttaattaaactatccattagacgtcctttggctatggcaattcttaacattgtgcatactcccttacttaaagtgttaaacctaacccaaacccttcgatgcttcctttgtaataaccacctgttaaaactcgagattcattttcagcaaaatgacattgaataaataaacctgtgtaataggatctaggtggctgcgcagtaatatctaaatggatgtctttgtaaccttgtgtatgtaaccaacgttcccatatttttaattcaacgagtgctggatggtcatttggaatatagtgctccaatacatttaattgttgttgcgtattctctttcaagatttgcacgattggatgttcagtcgacaaatatgtaaccaatcccgataaattacgttcctcaatcattgatagtatgtctggtgtttgtaacgatttatcgagtaaggcatcaagcaattgataatgtcccaatacaacaaaatgcacgttgtctcttaactgctgttgaataaactgaataaatagctttaagctctgttgtacattcgctaatgatggtgcatagttttccaaaccaacttgtacagccgcttcattattccgaatgattaaacctgtgtatgccacttttgttgctgcagttggatacattgagtaataacgcaataattgatctgtaaaatcatttcgaagtgcataaatttgatgctcatgttgccaaaaatttcgctcacccatctgctgcaaatcctcatggttcaattgtttccagtccaacttttcaaccacactaaaatcaactaactcataatccgctttattaaaatattttaaaaatgctgtttccgcttcttttaacgcaattaattgttttgaattattcactcgaccaccctttactttcaatactgtatttaaaatcatttgctgttttcgttatttgctttacttctctaccacaataaagtgtaatatgattaataacttatcatttttagcaatacattacaacctttttcagaaaattcggtgtattggttttaaattttttcaaaagaaaaaggcaagacatttgtgcctataaaaatgcttaaccaagatttttatattgaagttgtacttcttgcacatattgtccttgccttattatgtaaagttattttctttctatctttttattaaatttaactattcttcataatcccgattacctttaaagaattgtctatcttgtttactatatacattttcaggattaaaaaacggtttgagtttatatttaaattcaaataagtttagaccatcaatcgcaaccctatcttggtaaacgttcgttgctgatatgtctgtaaaattatttggaccaacacctgcaataaatttaaagcctgctttatcgaccaaataatcatacgctgatgtatgcctatcttgtgcaccgtgtggaaatacaaacatatctgttttacctacaattggttcaacttcatctttccatcttttagtatcacgttgaataccttctaaagatgttttttcaaaattaatgtgaccatatgaatgactcgcaaatgaccatccatctcgtttcattgcacgaacaacttcttcagctgcttttttattctttgtataatctttactcgttaattcattcgtccgataacctaatacgccctcataaccggttaaagcaacaacacctttttcaccatttaaagaaaaatctggatgctcttttacaaatttatttaaaattggcacgatatcattgtcatcagaataagtagtatgacctttggaatctgtcgtttcagatacaacatgcttatttttatcaagaactaagcggtcagcataaccatggtgtctcatataactatagtaattcatatcatcaatcgagatgattaaaggctttttacctttcggcaattttatttttttggcttttacatgatgagatgataagtcgtatacatcatgcggattaacgatgatgtaattatttttatataatgcgttcaatgattttttaaattcacttacagtaatcatccaatcattgttgcccttagcttggtgtgtatctcctgtaaacgcaacttttgggtctgtaattaaaggatgataaaacacatgataaacttcgccatgataagtctcccaatgttcatctactttcgacttatgctttgcatactcatttggattaacagatttattttgagctttctcattatgtttagaacagctatataacaatgcaactgataataacagaaaaaatagcaataaatattttttatgcattaaacattctccctatgttttattatgcacaattataacatttttattatgtggctcataactttttaagaaactgttgggattttaattttattttttagataatgtcatagtattctatttataaaacacaatatctccttgattgataatgtcgtccatagcttcgtctcgcttgaaattaagcctttctgctaaatttattgaacgttggttacacttatttatgtttgaattaattgactagggtataacaatagtgtggtgttttatagatatgtcttttatatgcatcataaaaaacattcgaattcgaaataaaatgcttgcatctttgttttataggtggtattgtatgtatatcaagtataaaaaatatatctaagagataaaaatatggaggttttatattatgacaaaatttacttttgatggtgcacacagtagtttagagttccaaattaaacatttaatggtttctaaagtgaaaggttcattcgatcaatttgatgtcgctgttgaaggagatattaatgacttcagcactttaaaagctactgcaacaattattccaagctcaattaacactaaaaacgaagcacgtgataaccacttaaaatctggtgatttctttggtactgacgaatttgataaaattacatttgaaacaaaatcaattacagaaagcaaagttgttggtgatttaacaattaaaggtatcactaacgaagaaacattcgacgttgagtttaacggcgtaagtaaaaatcctatggatggttctcaagtaacaggtattattgttactggtataatcaacagagaaaaatatggcattaactttaaccaaacacttgaaactggtggagtaatgctaggtaaagatgttaaattcgaagcatcagctgaattctcaatctcagaataacctcatctcataatcctcattgattttaatatatacgaaatgccaactatatcatccctagatatagttggcatttttttacttctaattaaaaatcgctaagatttaaacttaaatttagacgcctttcattcaggtaggtcttattgaaactgaaaactttgatgaccttttgcaaagccattaactgtataaagcacagatcctccgcccatttcaatatcattggaacaaataatgagttgatttgtaccaggtataaattgtggatgtgtagaacgtaacatatgaccttcttcacgacctggtatcaatatttgtcctattggataacctcttttattaaatactaatactcgaccttgaccatacatagccacatataaattatcatcactatcaatacaacaagagtctggaccttcatgccccgtaaaatagtacggaattgttgccccaaatggttgtatcgtcacaccatcatcttcaagcgcaatacgatgtaatctatttgcggtcgtttcagttacccatagtactttttcatcagtacttaaagcaataccattagctacactgatattttgaataataggtgttactgttttaaagtctggcgtaacataataaacgcctcctagcgggttggtagagtatcctctaaaatctgtaaaataaaacccacctttagaatcaaataccatgtcatcaatacaatattctgttgatagatcttcaatgatatcttgtatgttgtcaccattttctgtcgctgcaaaaataccacctgtagatttaaaatctcctaaataacaaataaataatcgaccgtctttatgtattttaattgctgccggatttgctttatggcttacaaaaggtcgcttaatttctttagtttctggatttactttaaaaatattcccttcaaacacatctaataagtatagttggccatgtcgatcaaagttcaatccttctaattgcaatccttttttggaaatttcaagccatggttcagctgtaattgtttgtaattcactttcagatataattggaacagcactattagacttcccgctataaaataatgtaggtaaatcttgttgtgacatcatgatcattcctttcatttcattcgttttaactatcatttttattttaaacaagggaactatcaaatcaaatgataacgttttcatttatctattttatcggtctagtggctgatttcaagctagaaatattgaatgacaatacaactctgttaaaatgatggacgtagacaaatatgcgtattgacgctttattttaaaaattaacatgcttataacatgtttttagaaggagattaacctatgaactatcaagttcttttatattataaatatacgacaattgataaccctgaacagtttgctcaggatcacttagcgttttgtaaagcacacaatttaaaaggtagaattcttgtttctacagaaggtattaacggcacattatctggtacaaaagaagaaaccgaacaatatatggcacatatgcatgccgatgaacgattcaaagatatggtgtttaaaattgatgaagctgaaggacatgcttttaagaaaatgcatgtacgtcctcgaaaagagattgttgctttagatttagaagaagacatcgatccaagacatacaactggtcaatatttatcacctgtagaatttagaaaagctcttgaagatgatgacacagtcattattgatgcacgtaatgattatgaatttgatttaggtcatttccgaggtgcaattcgtccaaatatcacgcgctttagagatttgcctgactggattaaagagaataaagcgttatttgcagataaaaaagtggttacgtactgtactggtggtattcgatgtgaaaaattttctggctggctattaaaagaaggtttcgaagatgtagcgcagcttcatggcggtatagctacatatggtaaagaccctgaaacaaaaggtcaatattgggacggtaaaatgtatgtatttgatgatcgtatcagtgttgatatcaaccaagttgaaaaaacgattattggtaaggattggtttgatggcaaaccatgtgaacgttatattaattgcgctaacccagaatgtaataaacaaatattagtttctgaagaaaacgaagctaaatatttaggtgcatgctcttatgattgtgctaaacatgagcgtaatcgttatgttcaagcaaataatattagtgataatgagtggcaacaacgtttaacaaactttgatgatttacatcaacatgcttagtattaattaaatacctttcaaaacacgctttgaaaatccgatttataaaggtttttcaaggctgtttttttatgcgcatgcataacctgatatgtttttaattatgcgcatgttatactaaattaaattttaatactgcggggtgtcttaaaatgcacattttagtaacagggttcgcgccttttgacaatcaagatattaatccttcttgggaagctgtgactcaactagaaaatattattggcacacatacaatcgataaattaaaactaccaacctcttttaagaaagtagatactattataaataaaacgttggcatctaatcattatgatgttgtactagctataggacaagctggtggtagaaatgccattaccccagaacgtgtcgccattaatattgatgatgcacgtattccagataatgatgattttcaacctattgatcaagccattcatttagacggtgcgccagcttatttttcaaatttaccagttaaagcaatgactcaaagtgttattaaccaaggacttcctggagcactttcaaatagtgcaggtacgttcgtatgtaatcacgtactttatcacttaggttatttacaagataagcattaccctcaccttcgattcggatttattcatgtgccatatataccagagcaagtcgttggtaaatccgatacaccatctatgccattagaacagatagttgcaggtttgactgcagccattgaagctatttctgatcacgatgatttacgtatagctctaggcacaacggaatagttataaatgcactaacaaaatacattccttaaatgactaacaactttgttaatagggtaatacttacggaagtatgttttatttatgggggaggaattaataatgactacaaaaacggtatttgatgtcattgatatgggtttaggatatttagtaaatgtgtatgatacttggaaagttgaaaaggtacttgatgattatcataagcctttttctaataccattcattggcaatttgggcatgtattaacaatttttgaatcggccttagctgttgctggtaaagagaatattgatttaaatatatatagacctttattcggaaatggttcgtctccagatgaatggaaggatgaagtaccgagtattgaaaggattttagaaggtctccaaacattacctgaacgtgcccgaaaactaactgaagatgatttagcaattgaattgaaacaaccaattgtcggttgtaataacttagaagagttattaatattaaatgccattcacatcccacttcatgctggtaaaattgaagaaatgtctcgtatattaaaaaatttaaaataaatatgtgcttattaaccgttaacaacacgttaacggttttttttatttgtttaaaaggccactcttagtctgcttacatacagattaaaagtgacctattaatatcatgtattatacatagaactaagaatagccttatctataaaaataattataatggtttatgagttaaatctttttcttaaaattaaatacagtcccaatatacctataaatacccatgtaatccatgaagttataatcttcataccagtttttggtaattcttttagaggattttcaggtttggttttattatctttaggttgatcatccttatccacttttgatggcttatctgggggagttggtttaactttattagaatgatcaggtttagttggtggtgttttgtcttttggtttttcaggatagattggtttattcggtttttctggcgtatatttatttgtcacaatcaagttacccatatcattgttatccacatgcgttgtatagccattaacttttgttaattcatcgactgtgtattttacttgttgtccttttgctttttcatctaatcctgtccacgtatgtgtccagttattagattcatttaatattgccgtttttcctgttgcttttccatcttgatatagctcaactttgatttcagttggtcgttttccgtcttggttattattgtcatcccaattttttgttactgttgccgatgtctctcctggtgtatacttgttcgttattgtcgtaccgttgatgtctgttgtgtagtcttttacgtgatcttcggtcactgtatattctattttctttccttcatcatacttcggtaagtctttaaattcgtacttccagtttgtttcagatgtcacgtctaacgtttttactttctctccgttagccaataaatttacactgactttttctggtctcttaccatcttgattgtctttgtcgtcccatactttttcaccgctaattgatgttgtttctggcgtatatttattcgtcacaatcaagttgcccatatcattgttatccacatgtgttgtataacctttaacttttgttaattcatcgactgtgtattttacttgttgtccttttgctttttcatctaatcctgtccacgtatgtgtccagttattagattcatttaatattgccgtttttcctgttgcttttccatcttgatatagctcaactttgatttcagttggtcgttttccgtcttggttattattgtcatcccaattttttgttactgttgccgatgtctctcctggtgtatacttgttcgttattgtcgtaccgttgatgtctgttgtgtagtcttttacgtgatcttcggtcactgtatattctattttctttccttcatcatacttcggtaagtctttaaattcgtacttccagtttgtttcagatgtcacgtctaacgtttttactttctctccgttagccaataaatttacactgactttttctggtctcttaccatcttgattgtctttgtcgtcccatactttttcaccgctaattgatgttgtttcgattggtttttcagtattagtaaccactaaaccattttcttttttagtatatccttctggtgttgtatcttcaccttgagcatttacttctttaactaaatatttaatagccttgccatttttgtcattttccggaagattagaccatgtcacttttgtcgttccatcttctaattttttaatctctgctttgtctactggtgttgtattttgattgtcatcttgtttgtacaacttgaaataaatcgttggtttcactttttgagtgccttcccaaaccttttgagcagaaacatcttttgttttttctatcgcttttgcattttcaatagtcgtaaaatatccctgattatctgtatctttcatagtaaacggatattctttatccttatcaaatgtatacggtgctggcgcctctatttcttttaaaatatagtctccactaggcaacgctttaatattagcaataccgtttgcatctgttataatctcaatttctttttgattgtcctttacaactgatccatcttttttagaaagtttaaattttacattagctataggagccttggtatctttatcctgttttaaaacttttaattcaccttttacagtaccttcaataccggcattagcattaatattgtgcacagtatgattaaatgatttcccgttcacttcttccttaccatgctcttgataccaagcttgtgaattattaacaaactctttttgctgttcattcgtaattttggttttgtagttaattgaaaaactattatatgacccatagccttgtagaattgttacatcaattgtgttcttcgtattatcaacagttatcttagaacctggaaaggctttttcaaaatcagtaattgcactttgtccactataataattgctatgtgtacctgtcacattaatgtttaatgtgcttaaatctaactgctgtccaccttgaatctgatcctttatagtaatatctttcgatacatatcttttttcattattaatatttaaaaaccatcgtacatgtgtcgtatcttctggcagcatatctcccgttttataatagaaaacactacttgttcccgcttcacttttatgaaccgtaacattcgttgatttattcccagatgttatcgtagctactttgtcatctgaagtatttgtttgcgttaaatttcttccttgtacttcaaattctgcaaatcccgaaacatcacttaatttttctactttatcattgaatgtaattgttgcaccgtctggtgtaataactgcttgacccacctgttcacctttaacagttaatggtactgttttactataaccctctatctttactgtaccgcttgtcggccatgccactttaatcgtgtcaccattttgtatttttccatttttatcgtcgaacgtcatttttactgtcgttttaccaccatcttctatcttagacgttgatacagttaaatctgtaacattcgttgatgaaatatctcgtgctgcaaatgcttcatttttattaaataaaggtgtgatgatatttaataacattataaagaccataaacttcaacacatttttgttcataaaaacccctccttatactctatgtcatatccacaggatactaataataaattataaactaatttagttcttattcaatgaaatttatcaaaaattcatattattattttattatgcaaaatatatacagtataacgaatacaagtgcatgaagttaacttgtatcaattaatttcttagtatattagttcattttcaaaatctattaaatttaataaacaccatctataccagttcttcaccgcttctcgaaaaataattatattaatgatttcgttaattgaatcttatatttaattattactgtacatcttttgaagttagctttattcttaaattgaaatatgtataaaacatagaaagaaggacgttttaacatggaaaacacggttaaatatcgtaagtttatactccctatcgttgtaggtctccttatttgggcacttacaccttttaaaccggatgctgtggatccaacagcatggtatatgttcgcaatattcgtcgcgacaatcattgcttgtattacacaaccgatgccaattggggctgtctctataattggatttacaatcatggtactcgttggcattgttgacatgaaaacggctgtcgctggttttggtaataatagcatttggttaattgctatggcatttttcatttcgagaggatttgtgaaaacagggcttggtagacgtatcgcacttcatttcgtcaaattatttggtaaaaaaacattaggcttagcatattctatcgtcggtgtagatttaattctagcgcctgctacaccaagtaatactgcgcgtgctggtggaatcatgttcccaattatcaaatcactttctgaatcatttggttcgaaaccgaaagacggatcagcacgcaaaatgggtgcatttcttgttttcacagaattccaaggtaatttaattactgcggctatgtttttaactgcaatggccggtaacccccttgcacaaaatttagcatctagcacatctaatgttcacattacatggatgaattggttcctagctgctttagttcctggacttgtttccttaattgttgtaccttttatcatttataaaatttatccaccaactgttaaagaaacacctaatgctaaaagttgggctgaaaatgaattagcgactatgggtaaaatcgctttagctgaaaaatttatgattggtatttttgtcgttgcattaacactatggattgttggtagttttattcatattgatgctactttaacggcctttatcgcgctagcattgttattattaacaggcgtcttaacatggcaagacattttaaacgaaacaggtgcttggaacacattagtatggttctcagtgttagtgttaatggccgaccaattgaacaagcttggatttattccttggttaagtaaatctattgctacaagtcttggtggattaagctggcctatagtactggtcattttaatattgttctacttctattcacattacttatttgcaagttctacagcacatatcagtgcgatgtatgcagcattactaggcgttgccatcgcatccggtgcaccaccattattcagtgcattaatgttaggtttctttggtaacctattagcttcaacaacacactatagtagtggcccagcgccgattctattctcttcaggttacgtgactcaaaaacgttggtggacaatgaacttaatattaggtttcgtctactttattatctggattggtttaggatcactttggatgaaagtaattggtatattttaaaatatttaaattagcgctcgaatctcattgatttgggcgctttttaatttgtatttaaaatcaatctttgctaaatcaagactccctttttaaaatacattcatacttcaaatcattgcgtgcttcactgaaaatttgtataaagatttaagtcattacgtaacatcacataaaatacatttttatataaacgcacttcattgattaacattacttatgtatcataaatcatcaaacaaaaaacactttcgcttaaattcatttaattatgaattcaaagaaagtgctttatttcatatttaatgtttcaaatttatacggctgtcactgttactgcacacacacctcagtctcaccttatcatgacacaaaggaaattgaaaatacatataattatctttcctcgtattttatagggtttttgcgaccggatgtttcttcaatttaatgtattgagaaagactatataacacaatacctgtccaaataaatataaacgtaattaattgatctatactaaaaggctctttgaaaacaaatatgccgagtacaaacattattgttggtccaacgtattgaataaatcctattagcgaaagtggaatacgttttgccccggctgagaataggattagtggtattgccgtaatagcaccagaaaataacaaccaaaatgatgacatgttcaatccaaatgacatctgatgttgctgccataaataaataacgtatattagtccagcaggtgcggtaacaatacattcaatcgtaatactgctgatggcatcaatatgtactacttttttcaataatccgtatgtaccaaaggataacgctaatataatagagacgattgggaattctccaatcttgagcgtcatatataatacaccgatgaatgcgaataaaatggctagccattcaaatttattgaatctttcttttaaaaagataagtgcgagcaaaatgctaacaagtggatttatataataacctaaacttgtttgtagtacgtgaccgttcgttacagcccaaataaatgtaccccaatttaatgtgataacataacccgctacgacaattgctagtaattgaatgggcttggctaacaattgattcatatctcgttgaaatgcattgcgttgtttttgtccaaccgcgagtatgaaaatcatgaatattactgaaaatataatacgaaaggctaaaatttcaaatgcacctattgcatcaacgaactgccaatatataggtagtattccccacagaatgtatgcactgagtgctaaaaatataccttttttatattctgaattcacttacatacctccttactctcccaatttttattttactgcatacgctcacttagttaagctaatataacgattttactaataatatttcgataaagatatcattttgtttatatttcccacatttattcaccaatcactaaacaatattaattttataaataattctgtacaaatcagggtatattgccagaaagactaccatacaacataaaggatggatacaaatgactttacctaaaattggaaagcctgcaacacgtgcattaaattcacaaggtatatacacattagaagatgtatcacaatatacaaagtcatctctaatggagatgcatggcgttggtcctaaagctatatcaatattggaacaagctttatttcagcaccaactacattttaaaacggaagttcattcatcattaccttttttattaacaggagatgtgtcatgcaatcatgcgcctaaacgtcaacaaatgatagattttatagttgctacagcagcattagatattgaattattacgttcactggttacaacagaatttatttggtctgtccctgaccgctttgacatatacggacctcaaatgttaattcaagaactatctaatcattacaatcaggttgctagtctcaatatccactccagcatcacacatgggtgcttaggttccatgcatggtattgaaatattaaaaactggtaaagagattcattttgctcatttttttgaatttgaaaatcataaaaaggatgccaagttaagcaaagtgacatcttacattgttgttggttaatgtatcaaattatatatatcgcaaaaaattctttttcggttacatgtatatttttatataacaaataattttgcataacatttttgttatatgaatactttttactagagtgcacattgaacatacagtatgattaaatatcatgttatgaaagaaggatatattttgactgtttttaaaaatgagcgcttaagctggttaccatacatagctattgtcattttgttacacgttattgggtttagttttttatggattgctggaaaagactatcatatcttatttggtatggggattcttgcatatacattaggtttacgtcatgcatttgatgctgatcatatcgccgcgatagataatacggttcgcaaattattacagcaacgcaaagatccatctggtgttggtttctacttttcaattggacattcatctgttgtatttttaatggctgtttttttaggagtatctgtaaaatgggctaaagatgaattaccacatttccaagatattggtggaacgattggtacactagtatcaggtttctttttagtgcttatcggtgtgttgaatctaattattttaatctctttaattaacttgttcgctaaattacgtcgtgaacacattgaagaagctgaagtcgatgcattacttgaatctagaggatttgtttctcgatttgtaggaccttatttcaaattaatcacgcgtagttggcacgtattgccacttggctttttatttggacttggttttgatacagctagtgaaattgcgttactcgctctttcttcaggcgcgtcacaacaggccatttcatttatcggaatcttatctttaccaattttattcgcatcaggtatgagtttgttggatactttagatggtgttgtaatgaaatatgcctataattgggcattcttcaatcctattcgcaaaatctattacaatataacgattactgcgatatctgttatagctgcattagtgattgggatgattgaattgctgcaaattcttgctgataaactagaattacatggtacattttggtcattcattgcttccattgaatttgactacttaggttatattctagtcgctttatttttaattacttggcttatttcaagtttaatttggaagtttggtcgcatagaacacaaatggtctaaataaagtaacttgtcttgcaatcatctttttattattgcgtttttagacaccctgcatactgactcctttagggtacgctctctgttgtcatattttgaatcttacttttaaagatgacagtattgagagcgtatttttctatctaaaatagatcttgtaaaatccagtgctttcttatttaaaattttagcatttctgtttacaattctcttatagtctttaatataggaggcggtatactaatgaatattgcaaagttagaagattatctacaaattgaaccaactcgttatgatcaaccgagtattgaagcattaaattattatgcgactcgctttatgttaacggtgcctttcgaaaatattgatgttcaaaatggtaaaccaatatctgtagatatcgatgcacttttcaataaaattgttcatgataaacgcggtggtttttgttatgagttaaacacatttttcaaagcatatttacaacaaaaaggatttaacccagaattaatgtcggctaccattcatacacccggtggcggtcgtagtcaaaacggttcacatgcatcacttgttgtttctattaataatgtcttttatgtaaccgatgtcggctttggagacttacctctaaatgccataccgattactttaccagatgatacacagcagatcactgatatcagtggtacattccgcgctattttcaacagtgaggataaggacattttctatgttcaaaaatatgaaaataatcattggcatacaaaatacgaagctgaattcaaggctagagaaatagaagaattcgatcaaaacattgaatataatcaaacacatcctgattcagtatttgtaaaacatttattaattacaatgccacaatcatttggacgtgctacaatgtctgaaaaccatttaactttaacaaaagatggaacgccagaaaagttagctatcacaaaagataactataaacaatttttaacaaaatattttggattaaatgtaacaattagtcgacttgaaaacagcgacaattaatcataaaaatacggacgtaacttactttaatgtaggtaacgtccttttttaatacacatgttcgttaggatgtgggacaaaaatgatacagcgccactaacaattaatgatttagtggttttcacacgttagccacagctcgtgtgcacttataaataggcatgcatgcataaaaaatactaatttctaaagaaaaagtatttctttattgacactctgtgcaaacacaacaaaaaggatatggcacaaacttcatgccacacccttcttttgaaccgcttcattttacttaagcaagtgcatctacaacataaatgacacctacgaatacaaatgcaatagcaatcatcgtcgaaataaagacgatacccattaatggattaaataataaaatgacaccgaaaacaatacctaataaattaaaaatcactgaaattagttttaagctaccactacccgaaaatgtaaataatccagcgatagagctaaaaataaaccaaaaagcaaacatgtagataaaaaatgccgagctagcaccaacattaaaaatgacaataagaccaaagagaatatctacaatccccataaacagaatccaattttggttaccaccaactaaagttttggcttttctacgataaacaatttgaatcacaccattaatcaatacaaataatccaattaaccatgtgattgcataaaagttttcaatggggaatgtaaaaataacaactgctaacattaataacaacacacccataatcaaactagaccatttaatgccttgatttcctttttccataacaatcatttcctttcaaaaaacgccttctttatattttcattagtggcactattattcattgtttaaattccctcatcttaacttatagaaacatttcctcagtgctaatactgtgatgctcaaattagttgaactgctttccaataatccaaattcacccgagaaaatcacaatatattaatatctttcaactatgtaagattcaaacattgaattgtaagtttagataaaggctgctgtcctaattattatttaaaatgaaattaaatacaaaaggagtgatactatgacgatattatcagtgcaacatgtttcaaaaacatacggtaaaaagcacacatttcaagcacttaaagatattaactttgacatacaaaaaggcgaattcgttgcgattatggggccttctggatcaggtaagacaaccttattaaatgtactaagttcaattgaccaaatttctagcggtagcgtgattgctaacggacaagagcttaataaacttaatcaaaaagcacttgccaaattccgtaaagaatcattaggtttcatcttccaagattacagtattctgccgacattaactgttaaagaaaacattatgttacctttatctgttcaaaaaatgtcgaaggcaacaatggaagaaaattataaagcgattacgacagcattaggtatttatgacctaggaaataaataccctagcgaattatctggtggtcaacaacaaagaactgcagcagcgagagcatttgttcacaaaccacaaatcatatttgcagatgagccaacaggcgcactcgactcgaaaagtgcaaatgacttattacaacgtttggaagaaatgaataaatcgtttgataccactattgtcatggttacacatgatccggttgcagcaagttttgcagaacgtgtcatcatgctaaaagatggccaaattcatacacaactttatcaggaaggacgttctaaacaggccttttatgaagacattgtacatcttcaatcagtattaggtggtgtctcaaatgacatttaaccatatcgtcttcaaaaacttacgccaaaacttaaaacattatgcaatgtatttattttcattattttttagcatcgtcttatatttcagttttacaaccttacagtttactaaaggtgtaaataatgacgactcgatggccatcattaagaaaggcgctttagtcggatcaatatttttatttatcattattgtcatctttttaatgtatgccaatcatttattcgtgaaacgccgtacacgtgaatttgcgctatttcagttgattggtttaacacgacaaaacattttgaaaatgttagcacttgaacaaatgattgtatttttaatcacaggtgttgtcggtgtattatgtggcattgcaggtgcacaattattgctttccattgtatctaaattgatgtcgttatcgattaacttatcgatacatttcgaacctatggcccttgttttaactattttaatgctaattattgcgtatatactgattttatttcaaagcagtttatttttaaaaagacgcagtatcttatcaatgatgaaagactcagttaagactgatgttacaactgcgaaagttacagttatagaagtcatttcaggcgtattaggtattgctatgattgcactaggatattatatggcgacagaaatgtttggtacgttcaaagcactaactatggctatgacatcaccgtttatcattttatttttaacggttgtaggtgcctatttattcttcagaagttccgtgtcactaatttttaaaactttgaaaaaatctaaaaatggacgcgtatctattacagatgttgtatttacatcgtctattatgtaccgaatgaagaaaaatgccatgtctttaactatcattgcaattatttctgcagttacagtaactgtattgtgtttcgcagcgttatctaaatcaaataccgatcaaacccttacatctatggcacccaatgattttaacgtcgtcaccgctcaagacgcgcaacaatttgaatctaaactaagccaacaacaaattacattttctaaaaatgcttacgaaactattactgtagataatgttaaagatcaggttattactttggaaaatggtagtgattcaggtcgcacgaattcaatattaagtgcaaataacaagttaacaggcaacaatgccatcattacaaatacaaaatcgctgcctaacgttattaatattcatttaaacaaagatttagtagtaaaaggtacaaagaacgagactttccgtgttacacaagaagacaaagacaaggtttatcctttaaatctaagctttaattcacctgtcattgaagtaagtccagaaaagtatcagcaattgaaaacacaaaataacgttcatactttttatggatatgatattaaacaaacatcacaaaagaaaaaagctcaagcaattgcaaaacagtttggagacaaaatcatcacttatgatgacatgaaaaaagaggtcgatgctactaacggtattctaatattcgttacatcatttttaggattagcatttctagtagcagctggatgtattatttatattaaacaaatggatgaaactgaggatgaactaagtaacttcagaatattaaaacgcataggctttacgcatacagatatgcttaaaggattattactaaaaattactttcaacttcggtttaccattattgattgctatattacatgcagtattcgccgcaatagcatttatgaaattgatgggtaatatatccttcatgccggttattatagtaatcattgtatacacactcatttacattgtttttgctttaatcgcttttgtacattcaaataaattgattaagaaaaccatttaacacttgtgattaaaagatgattcattgagattttgattttaagcaatgcagtataacttttaactgatttataaaaaggagagattgaagcatgaaatttagagaattagtaaaacaatcatacgaggatttgaaaaatttgactgtaacttggtataacgttattgctttagcaatgattgttattgtcttaagcgccgttacaacaccaattataggtattccagctggtttattaggtggcgcttattatttaaaacgccgcgaagaaaaaggtaaataagcgcattccatcagtataaaacattgctatgacctatcaagtcagattttaatatcagggagtgggacagaaatgatattttcgcaaaatttatttcggttaaatattaatagaacaagcagcggttagtcgttgcttgttttctatttttaaaaattaagacatctttctagaatccaatttaaaattaagtattactctatatatgtgaatacttatcattatccagagcacccccaacgtgacaccacctaatacgtctgtaaaataatgtgcatggaagtaaagtctcgaaactagaatactcaaccaaataacaacaataactatttgaagtattattctaagtacgtattgcgttagctgaggtagaatcaaaaatagcaaaatcataataaccatcgtactcgatagtgcatgaccacttggaaatgaaaaaccagaatcttgtattaaatgatcatagggtctatctcgatgtaatatttttttcataataatgccagcgataccacctgaacctaccgtaagaatgacccacatacctagtaggtatgactttttactaagtagaataatgccaatgatgatagctacaaatagccacgttgcaacatctccatatttagccactacagttaaataatcatttaataaaccaccttgaaaatttaattgcggattgccaaaatttgatttaaaccaattgaaaatgatattatctaactcttttaataatgtaaattgaaataatacaaaagtaattaatcctatcataatgatggtagtaattgttaatatacttctcgtttttaaagctaacatttgtcttctcattatctttatcctttttgtaaattttactaattataacttttaaaaataaaaatggtatcagtatttagactgatatatcaatataattgataaattttcaaatgcttataaacccctttaaatcaacgtttctaaggtttttaaaaatcttttttaatttattttcaaaaaagactgtacattatgccaatatgagcgtatagttggacttacgtaataaaagctcgtgaattaaattgtagtgtatttgtttagaatatcctcttttttagttatgaatttgttacaaatattaagtgcaaaagcacacggaggttttctatatgaataacggtacagtaaaatggtttaacgcagaaaaaggttttggtttcatcgaacaagaaaatggcggagacgtattcgtacatttctcaggtatcgctagcgatggctacaaaactttagaagaaggtcaaaaagttactttcgaaatcactgaaggtcaacgtggagaccaagcagttaacgtacaaactgtttaatcttacaaaataaaacgactcattataaatgaatcgctttgattaccaacaagatttagaaccttgttggtatttttttatgctattttggataatataaataatatgaggccgtaccacgatgatttataaaaacttatttgccagatgcatactaatcaaagctataagaatgattgcaccaacaaatgctatgaaagaaagtacacctgtttttatatttctagctttagtcgtttgtacttcactaggatcttttccattcataaaagcaacaattcgatcgtagttatccattttatgcacttttttaaagtcttctattttcatagatgcataaaaacctattccataaatgactatcaccgttataccccaagcccaattccaataaacaactaaaggtcccattaaaattgcagctaatgttatgaaaataagcatcacatatgtccataagttaaggcttcgttgcactttaatatcaggtacaaatggaatagtcccttttactaaatcatctaaagttacattgaacaattcgcaaatcattaataagttatgtatgtctggtaagcttttgtcattttcccaattagaaatactctgcctagatacatataacttttcagcaagatattcttgtgaatatccatctcgttcccgatactttttaatttgtttactcagattcaattacatacgcctccattcaattagtacaatcattaaaatcagactatcagataaagttaaatcacgtcacctttatgattgactaaatattttgacatacgacaacatcaaggttcgaagactcccttaagacaaacctgtatgattacgcgcttgtaattttctcaatgccaacttgaatttcatttattaatgatgcaacttttccctgctattcaatgcttgcgaagttagtcctatttaagagattacgttcacactatttactattcgattttccagctttccaactatgcttttctaatcttttttgtgctataaattctaccgcttcaaaaatacatacggcactgatgaaccagcttaggaaaccaacaataatgctaatcaaccacatgtgcgtcatatgtaacatcatccatgtaactaaaatacaaactaatacccctgtcataccaaacactgcgccacgacttacatgcacagcgactttatcaccatattgcatacctgtaataaacatagacactaaaaatactgccggaaacgttgcaaatataccgccaaattctttccaaggtagtgttacagatacaatataacttaataatactgcaaatccccccacaaaaaatttcattaatgttaatttcatgatgttctgcctccaataatttattacttaataactgaatacaactaattatcatgcattttccaaactataaatgtctaatactgaatattgcgagggaaataacaaaccaacaaacaactgtgaatattgcacctttccgataacctttatgcttaatatagagagatgtcaaaaatacagttaatatacaagacagaataccgacaattgctccagtactaagattcatcgacatctccactaattgcgtaccacgatgatccaaagctaatgcgataatagccgcaagaaagactgccggcatagtagctataatgcctcctaacttgccacctaccttatcagcaataattgaagctaatgcaacagcgataccaccaatgacaaaatgaagaattgcacttccaattgaaaacatcttcaacgtacctttctataattaattcaatacaaaacgtatcattcacacaaagtgtaaaacttaaattttctactgtaaaggcaactgaagcgatgttcataaagctttcatgatactttcataaactagcaataaagggttcaaataaaggtatatccagctcaaattattgaaaattaccattaactgtaattttcaaatcaacatataaatataaatttttatgtttcacgtaaaacaaaaaaaaacaaagctgttatgatcttagctttgtcttttatgtgttagtcatcatgtatacgacatcctactactaacgtttatatattcgaatttttatttcataataatcttcatgatctttgtctttatgctcaacatgtaatcctgtttgttgaatcgcttggatacttttgcctacctcatctcgtgcttgagtgacatcttgtgcaaagcgaaggttttgtgctttgactttttcgggccccgttttttggcgtactctatcttcagtctgtttcacatttagtttttgtgcaatgacttgctcaatcaacgcttcttgttcgctatcagacaatgataataccgctctcgcatggcgttcagtaattttaccttctcttaagcgaagtagtactttcggcgccaacttcaataaacgcaacttatttgcaataaagctttgacttttacctaaactttttgccaattcactttgcgttgtatcaccaatttccaataatttcttataggcttccgcttcttcaacaacagacaaattttctctttgaatattctcaattaatgccacaacagccgtctcttcatcatccatatcacgaataataacgtctgcttgaggtaaatttagtgattgtattgctctaaatcggcgctctccagcaataatttcaaacatatcttcttcaatcggtcttacaacaataggctgtaataaaccatgttcatgtattgattcagcaagttctttaattttatttggttcaaacacctgtcttggttgataacggttgggaacgatacgttcaatttgaatggattcaacattactattgcgatcttcttcaatatgtccaatgatgtcatctttgtttttcaaaccaaataattttgaaaaaggttttttcattatccattcgctccttttatgttagttgtaaaggattatgcattatttttcaagtaaaggagtcttattaggcgtccctggttttcttggatactttttcggcgtctgtctttttttatcaataatgaacatctggcgctctccagcatcttctggcaattcaaaggtatgtgtttctgtaacgttaccacctaacacactaattgcaaattttgcttcttctaattcttcttcaccttttgaagattttaatgcaacaaactgtccaccttttttaactagcggtaaacacaattcactcaacacggataatctagctactgctcttgcagtaacaacatcataagactccctgtagacacccttaccaaatgtttctgctctatcgtgtataaagctgacatcctgtaattgtaattctgacgctaaatggtttaaaaattgaatacgcttatttaatgaatcaacaatcgtcacttttaactgcggaaacattatttttaacggaatacttggaaaaccagctccagcgcctacatcacatatacttataggctgattaaaatcaaaataaaaactaggtgcaatggaatcataaaaatgtttcaaatatacatcgtgttcatctgtaatacttgtcaaattcatcttttcattccattcaacaagtaaacgataatatgtttgaaactgttgtttttgagtctcagttaattcaatattatgttcttttaattgttctgctaaccattctacagtcattagtcactcaccctttggagtttaccttgttctaagtaaatcaataatatagatatgtctgctggatttactcctgatattctagaagcttgtgcaatatttaaaggttttacttctgataatttttctcgcgcttcagtcgccaaactatcaattttactataatctaagtcttctggaattttcttctcttccatacgcttaactttctcaacttgttgtagtgatttattgatataaccttcatattttgtttgtatttctacttgttcttcaacatctgcattcaattgatgttcttcttctaaaatttctaaaattatatcgtaagtcatttcaggtctgcgtaataaatcgatagctaaaataccatcttttaagcgagaaccaccatgttgctcgataatcgcttgcgtatgttcgtttggtttgatacgaatatctgataaacgcttaatttccgcatcaatttgctgacgtttttcattaaaacgtgcatatcgttcttcagaaatcataccaagttcatatcccatatccgtcaatctcaaatcagcattatcatgacgtagtaacaaacgatattctgcacgtgatgttagtaaacgataaggttcattagtacctttagttacaagatcatcgattaacacaccaatatatgcatctgaacgacttaatatcttttcgcctgtgtttaacactttaccagcagcgttaatacctgccatcaatccttgtcctgctgcttcttcataaccagatgtaccattaatttgacctgcagtgtataagtttttaatcattttcgtttcaagtgtaggccataactgcgttggcacaatcgcatcatattcaattgcgtagccggcacgcatcatatctgctttttcaagacctggtatcgtctctaacatttgacgttgcacatgttcaggaagacttgtagacaatccttgtacatatacttcatttgtattacgaccttcaggctctaagaaaagttgatgtcgcggcttatcattaaatcgaacaaatttatcttcaattgaagggcaataacgtggcccggttcctttaatcatccctgaatacattgcagatagatgtaaattatcatcgataactttgtgtgtttcagcattagtatacgttagccaacatggcaattgatctaatatatattctgttgtttcaaagctgaatgcacgacctacatcgtcacctggttgtatttcagtcttcgaatagtcaattgtttttgaatttacacgcggtggtgtacctgttttaaaacgaacaatatcaaaaccaagttctcttaaattgtctgataatgtgattgatggtaattggtgatttggtccacttgaatacttcatattacctaaaatgatttcaccacgtaaaaatgttcccgttgtaataattactgctttagataaatactctgtaccaatatttgtacgtacacctttaacttcattatcttctataataagttcgtctaccataccttgcattatatgcaaattttcttcatcttcaatcacgcgtttcatttcttgttgataaagtactttatctgcttgcgctcttagtgctcttacagcaggtcctttaccagtatttaacattctcatttgaatgtgtgttttatcgattgtttttgccatttgtccacctaaagcatcaatttcacgaacaacaatacctttagctggcccacctacagatgggttacatggcataaatgcaatattatctaaatttattgttagcattaatgttttagcaccacgtcttgcagatgctaaacctgcttctacacctgcatgtccagcacctataacgattacatcatattcttgagccacaatataagcctccttatttgatatcttactagccttctttagactgtattccgtctaattcaattactatttacctaagcagaattgactgaataactgatcgatgagttcatcacttgcagtctcaccaataatttctcctaatatttcccaagttctagttaaatcaatttgtaccatatccataggcacaccagattctgctgcatcaatcgcatcttgtatcgtttgtcttgcttgttttaataatgaaatatgtcttgaattagaaacataagtcatatcttgattttgtacttctccaccaaagaacaaatctcgaatttgtatttctaattcatcaataccttcttgttttaacattgaagtttgaattaatggcgtatcgcctatcatatctttaacttcattaatatctatattttgctctaaatccattttattaacaattacgattacatcttcatttttaactacttcatataatgtgtaatcttcttgagtcaatgcttcgttattgtttaatacaaataaaattaagtctgcttggctaagagcctttctagagcgttcaacaccaatcttctctactatatcttctgtctcacgtataccagcagtatcaactaatcttaatggcacaccacgaacattgacgtactcttccaagacatctctagtcgtacctgctacctcagttacaatcgctttattatcttgtattaaattatttaacatcgatgatttacctacgtttggtttaccaacaataactgtagataaaccttcacgcataattttaccctgcgcaccggtatctaataaacgattaatttcctgtttgatttctttagactgctctaaaagaaattcagtagtcgcatcttcaacatcatcgtattcaggataatcaatattcacttccacttgagcgagtatctctaatatagattgacgttgttttttgattaagtcacttagacgaccttcaatttgattcatcgcaactttagaagctctatctgttttcgagcgaataaaatccataactgcttcagcttgagataaatcaatacgaccatttaaaaaagcacgttttgtaaattcacctggctcagccattctagcgccataggtcatagtaagttccagcactctattaatcgttaaaataccaccatgacaattgatttctataatatcttcgcgtgtaaatgtttttggcgctcttaacacagacaccataacttcttcaaccacttctttagactctggatcaataatatgaccgtaattaatcgtatgtgatggaacatcatttaaaagatgttttcctttatataatttgtcagcaatttcaacggcttgcggtccagacaatcgaacaattccaattgccccttcacccattggtgttgaaatactcgtaattgtatctaaatccatattgctactcgcctccttcaacgacgtgaatacattttaaagtaagttattataaccctaaggtaagtcttacgtttgtctgaggtaagacttcgggaggtgttgagtggttaatgttttacttcccttcccctaccctatccttacttaatctttttattaaaaactttggcaattttaagtacgtgctcaagactattctgtatttgtaaagtcgtcatatctttagctggctgtcttgctattacaataatatctttggccaatatatgcgacttatgtactttgaaattttcacgtattgctcttttaatcttgtttcttaacactgcattacctagttttttagaaacactaatacctaagcgaaaatggtctatttctttattattacaagtgtatacaacaaattgtctgttggctacagaatgaccttttttatatattctctgaaaatctgcattctttttaattcggtaagctttttccaataacatcactcgcttatttatcgtttttatttgaagctatatttaaacttctattgagcttataacataaatttctatttattcttaatttaaacgaaaaaaaagatcactgatgagtcagtgatcttatgcagataaaactttacggcctttacgacgacggcgcgctaaaactttacggccattttttgtgctcatgcgttttctgaaaccatgaactttactatgtttacgtttatttggttgataagtacgttttaccatgcaaaacacctccatctttatacagttatctaatataccagattatgcagactctgatcactttaatagataagattttgcgtttcttagattaaaattctcgtattagctcattgattatctagtcataattcaagcaactactacaatataacaaaatcctttttataacgcaagttcattttat
